(19) United States
(12) Patent Application Publication
(10) Pub. No.: US 2024/0101668 A1
(43) Pub. Date: Mar. 28, 2024

(54) POLYPEPTIDES AND THEIR USE IN TREATMENT OF DISEASE

(71) Applicant: WUGEN, Inc., St. Louis, MO (US)

(72) Inventors: Ayman KABAKIBI, San Diego, CA (US); Alexander S. HAMIL, San Diego, CA (US)

(21) Appl. No.: 18/447,138

(22) Filed: Aug. 9, 2023

Related U.S. Application Data
(63) Continuation of application No. PCT/US2022/015980, filed on Feb. 10, 2022.
(60) Provisional application No. 63/148,012, filed on Feb. 10, 2021.

(51) Int. Cl. C07K 16/28; A61K 39/00; A61P 37/04; C12N 15/86

(52) U.S. Cl. CPC C07K 16/2803; A61K 39/4611; A61K 39/4631; A61P 37/04; C07K 16/2851; C07K 16/2863; C12N 15/86; A61K 2239/11; A61K 2239/21; C07K 2317/24; C07K 2317/565; C07K 2317/622; C12N 2740/15043

(57) ABSTRACT

Disclosed herein are polypeptides, such as monoclonal antibodies (mAbs) and functional fragments thereof, synthetic antigen-binding proteins such as single-chain variable fragments (scFvs), and chimeric antigen receptors (CARs), that can specifically recognize tumor-associated antigens (TAAs) on cancer cells, for example those that express CD33, FLT3, and CLL-1, useful in the treatment of diseases such as cancer.

### CROSS REFERENCE TO RELATED APPLICATIONS

[0001] This application is a bypass continuation of International Application No. PCT/US2022/015980, filed Feb. 10, 2022, which claims priority to, and the benefit of, U.S. Provisional Patent Application No. 63/148,012, filed Feb. 10, 2021, the entireties of each are incorporated herein by reference as if written in their entireties.

### INCORPORATION OF SEQUENCE LISTING

[0002] The sequence listing that is contained in the file named “WGN0011-201BC1-US,” which is 3.57 megabytes as measured in Microsoft Windows operating system and was created on Aug. 8, 2023, is filed electronically herewith and incorporated herein by reference.

[0003] Targeted immunotherapies are based on the recognition of antigens, defined structures on diseased cells or pathogens, by immune receptors that are either soluble, i.e., antibodies, or present on the surface of immune cells, such as chimeric antigen receptors (CARs) in CAR-bearing immune effector cells such as CAR-T cells. Recognition and binding of the antigen by the immune receptor usually triggers effector functions that eventually lead to the destruction of the respective pathogen or cell. Soluble immune receptors include natural or synthetic antibodies, antibody derived molecules and other structures, which upon binding to an antigen trigger the complement system or recruit and in most cases activate effector cells. Alternatively, antigen-targeting cells can be generated through the genetic insertion of engineered immune receptors, such as transgenic T-cell receptors (TCRs) or CARs into T cells or other immune effector cells including natural killer (NK) cells. Commonly, CARs comprise a single chain fragment variable (scFv) derived from an antibody specific for a certain target antigen coupled via hinge and transmembrane regions to cytoplasmic domains of T-cell signaling molecules. The CAR-mediated adoptive immunotherapy allows CAR-grafted cells to directly recognize the desired antigen on target cells in a non-HLA-restricted manner.

[0004] One common application of these immunotherapies, though not the only application, is the treatment of cancer. Cancer is a broad group of diseases involving deregulated cell growth. In cancer, cells divide and grow uncontrollably, forming malignant tumors, and invading nearby parts of the body. The cancer may also spread to more distant parts of the body through the lymphatic system or bloodstream. There are over 200 different known cancers that affect humans. Whereas good treatment options are available for many cancer types, others still represent unmet medical need.

[0005] Amongst these are hematologic cancers. Cancers of the hematopoietic system can be roughly divided into different subtypes. Leukemias generally affect the primary lymphatic organs, which are the bone marrow as well as the thymus, and arise from hematopoietic progenitor populations, such as, for example, acute myeloid leukemia (AML). Lymphomas on the other hand are usually derived from mature lymphocytes and originate from secondary lymphatic organs.

[0006] The current first line treatment for most hematopoietic cancers involves the administration of chemotherapeutic agents (either broad-spectrum or targeted therapies), radiation therapy or a combination of both. In many cases such therapies are combined with or followed by hematopoietic stem cell transfer (HSCT), where the graft versus leukemia (GvL) effect mediated by donor-derived lymphocytes, especially T cells, can lead to the eradication of cancer cells that survived pre-conditioning chemo- or radiotherapies and result in complete remission (CR). Depending on the type of hematological malignancy, the patients' condition, and the availability of hematopoietic stem cell grafts, various versions of HSCT are regularly performed in the clinics. The desired GvL effect is, at present, only achieved in allogeneic HSCT, which at the same time is often accompanied by the occurrence of graft versus host disease (GvHD), a serious and sometimes fatal complication. Moreover, in all cases, persisting cancer stem cells often lead to disease relapse.

[0007] In recent years there has been strong progress in the development of targeted immunotherapies, such as CAR-T cells, for the treatment of cancer. However, most broadly target antigens which are expressed on malignant as well as healthy cells, and do so using polypeptides which target antigens in a polymorphically nonselective manner. Additionally, relapse of hematologic cancer in patients transplanted with HSCT remains a problem to be solved. Therefore, there is a need for the development of novel therapies for the treatment of diseases, such as cancer, that enable the utilization of alternative target molecules, and reduce or avoid the side-effects often associated with current targeted immunotherapies in general, and CAR T cell therapies in particular.

### SUMMARY

[0008] Provided herein are polymorphically selective polypeptides, including single-chain variable fragments, monoclonal antibodies and antigen-binding fragments thereof, antibody-drug conjugates, and chimeric antigen receptors and engineered immune effector cells comprising them, useful in the treatment of diseases such as cancer, and in some embodiments, in combination with polymorphically mismatched hematopoietic cell transplant in a manner that permits selective killing of the patient's diseased cells while sparing transplanted hematopoietic cells.

### BRIEF DESCRIPTION OF THE SEQUENCES

[0009] SEQ ID NOs:1-200: sequences of CDRs and VH and VL chains of polymorphically selective anti-CD33 polypeptides 1-25.

[0010] SEQ ID NOs:201-336: sequences of CDRs and VH and VL chains of polymorphically selective anti-CD33 polypeptides 26-42.

[0011] SEQ ID NOs:337-528: sequences of CDRs and VH and VL chains of polymorphically selective anti-CLL-1 polypeptides 43-66.

[0012] SEQ ID NOs:529-704: sequences of CDRs and VH and VL chains of polymorphically selective anti-CLL-1 polypeptides 67-88.

[0013] SEQ ID NOs:705-1144 and 1979-2002: sequences of CDRs and VH and VL chains of polymorphically nonselective anti-CD33 polypeptides 89-143 and 191-193.

[0014] SEQ ID NOs:1145-1520 and 2003-2058: sequences of CDRs and VH and VL chains of polymorphically nonselective anti-CLL-1 polypeptides 144-190 and 194-200.

[0015] SEQ ID NOs: 1521-1538: amino acid sequences of selected CAR components.

[0016] SEQ ID NOs:1539-1598: sequences of exemplary CARs which may be made using the polypeptides disclosed herein.

[0017] SEQ ID NOs:1599-1626: Human antibody Fc components which may be combined with polypeptides disclosed herein to form diagnostic or therapeutic antibodies.

[0018] SEQ ID NOs: 1627-1802 sequences of exemplary anti-CD33 and anti-CLL-1 IgG1 antibodies comprising Polypeptides 1-88.

[0019] SEQ ID NOs: 1803-1978: sequences of exemplary anti-CD33 and anti-CLL-1 IgG4 antibodies comprising Polypeptides 1-88.

[0020] SEQ ID NOs:2059-2810: sequences of CDRs and VH and VL chains of polymorphically nonselective anti-FLT3 polypeptides 201-294.

### BRIEF DESCRIPTION OF THE DRAWINGS

[0021] FIG. 1 shows the CD33 extracellular domain (ECD) with amino acid (AA) 69 in the left panel, and FLT3 ECD AA267 in the right panel, each in a relatively solvent-accessible position.

[0022] FIG. 2 shows control (C) parental Jurkat cells, Jurkat cells expressing CD33-R69 (R69), and Jurkat cells expressing CD33-G69 (G69), and treated with:
[0023] A: PD-L1 scFv as a negative control, yielding a mean fold intensity change in R69 and G69 over parental cells of 0.73 and 0.66, respectively;
[0024] B: CD33 nonselective scFv as a positive control, yielding a MFI change in R69 and G69 over parental cells of 78.9 and 74.6, respectively;
[0025] C: CD33-R69 selective scFv, yielding a MFI change in R69 and G69 over parental cells of 20.3 and 0.58, respectively; and
[0026] D: CD33-G69 selective scFv, yielding a MFI change in R69 and G69 over parental cells of 0.59 and 45.9, respectively.

[0027] FIG. 3 shows the fold selectivity of polypeptides 1-42 against huCD33-R69 or huCD33-G69 stably expressed in Jurkat cells.

[0028] FIG. 4 shows the results of an vitro cytotoxicity assay wherein a culture of CD33^{GLY69} cell targets are treated with CART33^{ARG69}, CART33^{GLY69} or CART33. CART33^{GLY69} and CART33, but not CART33^{ARG69}, effectively kill CD33^{GLY69}-expressing cells.

[0029] FIG. 5 shows the results of an vitro cytotoxicity assay wherein a culture of CD33^{ARG69} cell targets are treated with CART33^{ARG69}, CART33^{GLY69} or CART33. CART33^{ARG69} and CART33, but not CART33^{GLY69}, effectively kill CD33^{ARG69}-expressing cells.

### DETAILED DESCRIPTION

[0030] Provided herein are polymorphically selective polypeptides, including single-chain variable fragments, monoclonal antibodies and antigen-binding fragments thereof, antibody-drug conjugates, and chimeric antigen receptors and engineered immune effector cells comprising them, useful in the treatment of diseases such as cancer, and in some embodiments, in combination with polymorphically mismatched hematopoietic cell transplant in a manner that permits selective killing of the patient's diseased cells while sparing transplanted hematopoietic cells.

### Embodiments

[0031] Accordingly, although other embodiments may be found throughout the disclosure, provided herein are the following embodiments:

[0032] Embodiment 1. A polypeptide which selectively binds a first polymorphic variant of a human cancer cell antigen over a second polymorphic variant of the human cancer cell antigen; or selectively binds the second polymorphic variant of the antigen over the first polymorphic variant of the antigen.

[0033] Embodiment 2. The polypeptide of embodiment 1, wherein the antigen is chosen from CD33, CLL-1, and FLT3.

[0034] Embodiment 3. The polypeptide of embodiment 2, wherein the antigen is CD33.

[0035] Embodiment 4. A polypeptide which selectively binds a first polymorphic variant of CD33 over a second polymorphic variant of CD33; or selectively binds the second polymorphic variant of CD33 over the first polymorphic variant of CD33; wherein the binding is at least 2-fold selective.

[0036] Embodiment 5. The polypeptide of embodiment 4, wherein the binding is at least 10-fold selective.

[0037] Embodiment 6. The polypeptide of embodiment 5, wherein the binding is at least 30-fold selective.

[0038] Embodiment 7. The polypeptide of any of embodiments 3-6, wherein the first polymorphic variant of CD33 is R69 and the second polymorphic variant of CD33 is G69; or the first polymorphic variant of CD33 is G69 and the second polymorphic variant of CD33 is R69.

[0039] Embodiment 8. The polypeptide of embodiment 7, comprising six complementarity-determining regions (CDRs).

[0040] Embodiment 9. The polypeptide of embodiment 8, comprising:
[0041] three heavy chain variable (V_{H}) domain CDRs: HCDR1, HCDR2, and HCDR3; and
[0042] three light chain variable (V_{L}) domain CDRs: LCDR1, LCDR2, and LCDR3.

[0043] Embodiment 10. The polypeptide of any of embodiments 7-9, wherein:
[0044] HCDR1 comprises an amino acid sequence with at least 95% sequence identity to an amino acid sequence chosen from SEQ ID NOs:1-25 and 201-217,
[0045] HCDR2 comprises an amino acid sequence with at least 95% sequence identity to an amino acid sequence chosen from SEQ ID NOs:26-50 and 218-234,
[0046] HCDR3 comprises an amino acid sequence with at least 95% sequence identity to an amino acid sequence chosen from SEQ ID NOs:51-75 and 235-251.

[0047] Embodiment 11. The polypeptide of any of embodiments 7-9, wherein:
[0048] HCDR1 comprises an amino acid sequence with at least 95% sequence identity to an amino acid sequence chosen from SEQ ID NOs:1-25,
[0049] HCDR2 comprises an amino acid sequence with at least 95% sequence identity to an amino acid sequence chosen from SEQ ID NOs:26-50, and
[0050] HCDR3 comprises an amino acid sequence with at least 95% sequence identity to an amino acid sequence chosen from SEQ ID NOs:51-75.

[0051] Embodiment 12. The polypeptide of any of embodiments 7-9, wherein:
[0052] HCDR1 comprises an amino acid sequence with at least 95% sequence identity to an amino acid sequence chosen from SEQ ID NOs: 201-217,
[0053] HCDR2 comprises an amino acid sequence with at least 95% sequence identity to an amino acid sequence chosen from SEQ ID NOs: 218-234, and
[0054] HCDR3 comprises an amino acid sequence with at least 95% sequence identity to an amino acid sequence chosen from SEQ ID NOs: 235-251.

[0055] Embodiment 13. The polypeptide of any of embodiments 10-12, wherein the HCDR1, HCDR2, and HCDR3 have at least 97%, 98% or 99% sequence identity to one of the recited amino acid sequences.

[0056] Embodiment 14. The polypeptide of any of embodiments 10-12, wherein the HCDR1, HCDR2, and HCDR3 have the recited amino acid sequences.

[0057] Embodiment 15. The polypeptide of any of embodiments any of embodiments 7-9 and 8-14, wherein:
[0058] LCDR1 comprises an amino acid sequence with at least 95% sequence identity to an amino acid sequence chosen from SEQ ID NOs:76-100 and 252-268,
[0059] LCDR2 comprises an amino acid sequence with at least 95% sequence identity to an amino acid sequence chosen from SEQ ID NOs:101-125 and 269-285, and
[0060] LCDR3 comprises an amino acid sequence with at least 95% sequence identity to an amino acid sequence chosen from SEQ ID NOs:126-150 and 286-302.

[0061] Embodiment 16. The polypeptide of any of embodiments any of embodiments 7-9 and 8-14, wherein:
[0062] LCDR1 comprises an amino acid sequence with at least 95% sequence identity to an amino acid sequence chosen from SEQ ID NOs: 76-100,
[0063] LCDR2 comprises an amino acid sequence with at least 95% sequence identity to an amino acid sequence chosen from SEQ ID NOs:101-125, and
[0064] LCDR3 comprises an amino acid sequence with at least 95% sequence identity to an amino acid sequence chosen from SEQ ID NOs:126-150.

[0065] Embodiment 17. The polypeptide of any of embodiments any of embodiments 7-9 and 8-14, wherein:
[0066] LCDR1 comprises an amino acid sequence with at least 95% sequence identity to an amino acid sequence chosen from SEQ ID NOs: 252-268,
[0067] LCDR2 comprises an amino acid sequence with at least 95% sequence identity to an amino acid sequence chosen from SEQ ID NOs: 269-285, and
[0068] LCDR3 comprises an amino acid sequence with at least 95% sequence identity to an amino acid sequence chosen from SEQ ID NOs: 286-302.

[0069] Embodiment 18. The polypeptide of any of embodiments 15-17, wherein the LCDR1, LCDR2, and LCDR3 have at least 97%, 98% or 99% sequence identity to one of the recited amino acid sequences.

[0070] Embodiment 19. The polypeptide of any of embodiments 15-17, wherein the LCDR1, LCDR2, and LCDR3 have the recited amino acid sequences.

[0071] Embodiment 20. The polypeptide of embodiment 7, comprising a VH domain having an amino acid sequence exhibiting at least 95% sequence identity to a sequence chosen from any of SEQ ID NOs 151-175 and 303-319.

[0072] Embodiment 21. The polypeptide of embodiment 7, comprising a V_{H} domain having an amino acid sequence exhibiting at least 95% sequence identity to a sequence chosen from any of SEQ ID NOs 151-175.

[0073] Embodiment 22. The polypeptide of embodiment 7, comprising a V_{H} domain having an amino acid sequence exhibiting at least 95% sequence identity to a sequence chosen from any of SEQ ID NOs 303-319.

[0074] Embodiment 23. The polypeptide of any of embodiments 20-22, wherein the V_{H} domain has at least 97%, 98% or 99% sequence identity to one of the recited amino acid sequences.

[0075] Embodiment 24. The polypeptide of any of embodiments 20-22, wherein the V_{H} domain has one of the recited amino acid sequences.

[0076] Embodiment 25. The polypeptide of any of embodiments 7 and 20-24, comprising a V_{L} domain having an amino acid sequence exhibiting at least 95% sequence identity to a sequence chosen from any of SEQ ID NOs 176-200 and 320-336.

[0077] Embodiment 26. The polypeptide of any of embodiments 7 and 20-24, comprising a V_{L} domain having an amino acid sequence exhibiting at least 95% sequence identity to a sequence chosen from any of SEQ ID NOs 176-200.

[0078] Embodiment 27. The polypeptide of any of embodiments 7 and 20-24, comprising a V_{L} domain having an amino acid sequence exhibiting at least 95% sequence identity to a sequence chosen from any of SEQ ID NOs 320-336.

[0079] Embodiment 28. The polypeptide of any of embodiments 25-27, wherein the V_{L} domain has at least 97%, 98% or 99% sequence identity to one of the recited amino acid sequences.

[0080] Embodiment 29. The polypeptide of any of embodiments 25-27, wherein the V_{L} domain has one of the recited amino acid sequences.

[0081] Embodiment 30. The polypeptide of any of embodiments 20-29, comprising a combination of a V_{H} domain and a V_{L} domain, wherein the combination is chosen from those recited in Polypeptide No.s 1-42.

[0082] Embodiment 31. The polypeptide of any of embodiments 20-29, comprising a combination of a V_{H} domain and a V_{L} domain, wherein the combination is chosen from those recited in Polypeptide No.s 1-25.

[0083] Embodiment 32. The polypeptide of any of embodiments 20-29, comprising a combination of a V_{H} domain and a V_{L} domain, wherein the combination is chosen from those recited in Polypeptide No.s 26-42.

[0084] Embodiment 33. The polypeptide of any of embodiments 30-33, wherein the V_{H} and V_{L} domains have at least 97%, 98% or 99% sequence identity to one of the recited amino acid sequence pairs.

[0085] Embodiment 34. The polypeptide of embodiment 2, wherein the antigen is FLT3.

[0086] Embodiment 35. A polypeptide which selectively binds a first polymorphic variant of FLT3 over a second polymorphic variant of FLT3; or selectively binds the second polymorphic variant of FLT3 over the first polymorphic variant; wherein the binding is at least 2-fold selective.

[0087] Embodiment 36. The polypeptide of embodiment 35, wherein the binding is at least 10-fold selective.

[0088] Embodiment 37. The polypeptide of embodiment 36, wherein the binding is at least 30-fold selective.

[0089] Embodiment 38. The polypeptide of any of embodiments 34-37, wherein the first polymorphic variant of FLT3 is T227 and the second polymorphic variant of FLT3 is M227; or first polymorphic variant of FLT3 is M227 and the second polymorphic variant of FLT3 is T227.

[0090] Embodiment 39. The polypeptide of embodiment 2, wherein the antigen is CLL-1.

[0091] Embodiment 40. A polypeptide which selectively binds a first polymorphic variant of CLL-1 over a second polymorphic variant of CLL-1; or selectively binds the second polymorphic variant of CLL-1 over the first polymorphic variant; wherein the binding is at least 2-fold selective.

[0092] Embodiment 41. The polypeptide of embodiment 40, wherein the binding is at least 10-fold selective.

[0093] Embodiment 42. The polypeptide of embodiment 40, wherein the binding is at least 30-fold selective.

[0094] Embodiment 43. The polypeptide of any of embodiments 39-42, wherein the first polymorphic variant of CLL-1 is K224 and the second polymorphic variant of CLL-1 is Q244; or first polymorphic variant of CLL-1 is Q224 and the second polymorphic variant of CLL-1 is K244.

[0095] Embodiment 44 The polypeptide of claim 43, comprising six complementarity-determining regions (CDRs).

[0096] Embodiment 45. The polypeptide of Embodiment 44, comprising: three heavy chain variable (V_{H}) domain CDRs: HCDR1, HCDR2, and HCDR3; and three light chain variable (V_{L}) domain CDRs: LCDR1, LCDR2, and LCDR3.

[0097] Embodiment 46. The polypeptide of any of Embodiments 43-45, wherein:
[0098] HCDR1 comprises an amino acid sequence with at least 95% sequence identity to an amino acid sequence chosen from SEQ ID NOs:337-360- and 529-550,
[0099] HCDR2 comprises an amino acid sequence with at least 95% sequence identity to an amino acid sequence chosen from SEQ ID NOs:361-384 and 551-572, and
[0100] HCDR3 comprises an amino acid sequence with at least 95% sequence identity to an amino acid sequence chosen from SEQ ID NOs:385-408 and 573-594.

[0101] Embodiment 47. The polypeptide of any of Embodiments 43-45, wherein:
[0102] HCDR1 comprises an amino acid sequence with at least 95% sequence identity to an amino acid sequence chosen from SEQ ID NOs: 337-360,
[0103] HCDR2 comprises an amino acid sequence with at least 95% sequence identity to an amino acid sequence chosen from SEQ ID NOs: 361-384, and
[0104] HCDR3 comprises an amino acid sequence with at least 95% sequence identity to an amino acid sequence chosen from SEQ ID NOs: 385-408.

[0105] Embodiment 48. The polypeptide of any of Embodiments 43-45, wherein:
[0106] HCDR1 comprises an amino acid sequence with at least 95% sequence identity to an amino acid sequence chosen from SEQ ID NOs: 529-550,
[0107] HCDR2 comprises an amino acid sequence with at least 95% sequence identity to an amino acid sequence chosen from SEQ ID NOs: 551-572, and
[0108] HCDR3 comprises an amino acid sequence with at least 95% sequence identity to an amino acid sequence chosen from SEQ ID NOs: 573-594.

[0109] Embodiment 49. The polypeptide of any of Embodiments 46-48, wherein the HCDR1, HCDR2, and HCDR3 have at least 97%, 98% or 99% sequence identity to one of the recited amino acid sequences.

[0110] Embodiment 50. The polypeptide of any of Embodiments 46-48, wherein the HCDR1, HCDR2, and HCDR3 have the recited amino acid sequences.

[0111] Embodiment 51. The polypeptide of any of Embodiments 43-50, wherein:
[0112] LCDR1 comprises an amino acid sequence with at least 95% sequence identity to an amino acid sequence chosen from SEQ ID NOs:409-432 and 595-616,
[0113] LCDR2 comprises an amino acid sequence with at least 95% sequence identity to an amino acid sequence chosen from SEQ ID NOs:433-456 and 617-638, and
[0114] LCDR3 comprises an amino acid sequence with at least 95% sequence identity to an amino acid sequence chosen from SEQ ID NOs:457-480 and 639-660.

[0115] Embodiment 52. The polypeptide of any of Embodiments 43-50, wherein:
[0116] LCDR1 comprises an amino acid sequence with at least 95% sequence identity to an amino acid sequence chosen from SEQ ID NOs: 409-432,
[0117] LCDR2 comprises an amino acid sequence with at least 95% sequence identity to an amino acid sequence chosen from SEQ ID NOs: 433-456, and
[0118] LCDR3 comprises an amino acid sequence with at least 95% sequence identity to an amino acid sequence chosen from SEQ ID NOs: 457-480.

[0119] Embodiment 53. The polypeptide of any of Embodiments 43-50, wherein:
[0120] LCDR1 comprises an amino acid sequence with at least 95% sequence identity to an amino acid sequence chosen from SEQ ID NOs: 595-616,
[0121] LCDR2 comprises an amino acid sequence with at least 95% sequence identity to an amino acid sequence chosen from SEQ ID NOs: 617-638, and
[0122] LCDR3 comprises an amino acid sequence with at least 95% sequence identity to an amino acid sequence chosen from SEQ ID NOs: 639-660.

[0123] Embodiment 54. The polypeptide of any of Embodiments 51-53, wherein the LCDR1, LCDR2, and LCDR3 have at least 97%, 98% or 99% sequence identity to one of the recited amino acid sequences.

[0124] Embodiment 55. The polypeptide of any of Embodiments 51-53, wherein the LCDR1, LCDR2, and LCDR3 have the recited amino acid sequences.

[0125] Embodiment 56. The polypeptide of Embodiment 44, comprising a V_{H} domain having an amino acid sequence exhibiting at least 95% sequence identity to a sequence chosen from any of SEQ ID NOs 151-175 and 303-319.

[0126] Embodiment 57. The polypeptide of Embodiment 44, comprising a V_{H} domain having an amino acid sequence exhibiting at least 95% sequence identity to a sequence chosen from any of SEQ ID NOs 151-175.

[0127] Embodiment 58. The polypeptide of Embodiment 44, comprising a V_{H} domain having an amino acid sequence exhibiting at least 95% sequence identity to a sequence chosen from any of SEQ ID NOs 303-319.

[0128] Embodiment 59. The polypeptide of any of Embodiments 56-58, wherein the V_{H} domain has at least 97%, 98% or 99% sequence identity to one of the recited amino acid sequences.

[0129] Embodiment 60. The polypeptide of any of Embodiments 56-58, wherein the V_{H} domain has one of the recited amino acid sequences.

[0130] Embodiment 61. The polypeptide of any of Embodiments 44 and 56-60, comprising a V_{L} domain having an amino acid sequence exhibiting at least 95% sequence identity to a sequence chosen from any of SEQ ID NOs 176-200 and 320-336.

[0131] Embodiment 62. The polypeptide of any of Embodiments 44 and 56-60, comprising a V_{L} domain having an amino acid sequence exhibiting at least 95% sequence identity to a sequence chosen from any of SEQ ID NOs 176-200.

[0132] Embodiment 63. The polypeptide of any of Embodiments 44 and 56-60, comprising a V_{L} domain having an amino acid sequence exhibiting at least 95% sequence identity to a sequence chosen from any of SEQ ID NOs 320-336.

[0133] Embodiment 64. The polypeptide of any of Embodiments 61-63, wherein the V_{L} domain has at least 97%, 98% or 99% sequence identity to one of the recited amino acid sequences.

[0134] Embodiment 65. The polypeptide of any of Embodiments 61-63, wherein the V_{L} domain has one of the recited amino acid sequences.

[0135] Embodiment 66. The polypeptide of any of Embodiments 56-65, comprising a combination of a V_{H} domain and a V_{L} domain, wherein the combination is chosen from those recited in Polypeptide No.s 43-88.

[0136] Embodiment 67. The polypeptide of any of Embodiments 56-65, comprising a combination of a V_{H} domain and a V_{L} domain, wherein the combination is chosen from those recited in Polypeptide No.s 43-66.

[0137] Embodiment 68. The polypeptide of any of Embodiments 56-65, comprising a combination of a V_{H} domain and a V_{L} domain, wherein the combination is chosen from those recited in Polypeptide No.s 67-88.

[0138] Embodiment 69. The polypeptide of any of Embodiments 66-68, wherein the V_{H} and V_{L} domains have at least 97%, 98% or 99% sequence identity to one of the recited amino acid sequence pairs.

[0139] Embodiment 70. A single-chain variable fragment (scFv) comprising the polypeptide of any of Embodiments 1-69.

[0140] Embodiment 71. A monoclonal antibody (mAb), or an antigen-binding fragment thereof, comprising the polypeptide of any of Embodiments 1-69.

[0141] Embodiment 72. The mAb, or antigen-binding fragment thereof, of Embodiment 71, wherein the mAb is of the IgG, IgM, or IgA isotype.

[0142] Embodiment 73. The mAb, or antigen-binding fragment thereof, of Embodiment 72, wherein the mAb is of the IgG1 isotype.

[0143] Embodiment 74. The mAb, or antigen-binding fragment thereof, of Embodiment 72, wherein the mAb is of the IgG3 isotype.

[0144] Embodiment 75. The mAb, or antigen-binding fragment thereof, of Embodiment 72, wherein the mAb is of the IgG4 isotype.

[0145] Embodiment 76. The mAb, or antigen-binding fragment thereof, of Embodiment 72, wherein the mAb is human or humanized.

[0146] Embodiment 77. The mAb, or antigen-binding fragment thereof, of any of Embodiments 71-76, wherein the mAb comprises a sequence chosen from SEQ ID NOs: 1201-1368.

[0147] Embodiment 78. An antibody-drug conjugate (ADC) comprising the mAb, or antigen-binding fragment thereof, of any of Embodiments 71-77.

[0148] Embodiment 79. The ADC of Embodiment 52, having Formula I:

Ab-(L-D)ₚ (I)

wherein:
[0149] Ab is an antibody comprising the polypeptide of any of Embodiments 1-43, or the antibody of any of Embodiments 45-51, or an antigen-binding fragment of either of the foregoing;
[0150] L is a linker;
[0151] D is a drug; and
[0152] p is about 1 to about 20.

[0153] Embodiment 80. The ADC of Embodiment 79, wherein D is chosen from saporin, MMAE, MMAF, DM1, and DM4.

[0154] Embodiment 81. A chimeric antigen receptor (CAR) comprising an extracellular ligand binding domain comprising a polypeptide of any one of Embodiments 1-69.

[0155] Embodiment 82. The CAR of Embodiment 81, additionally comprising:
[0156] a hinge domain;
[0157] a transmembrane domain;
[0158] optionally, one or more co-stimulatory domains; and
[0159] a cytoplasmic signaling domain.

[0160] Embodiment 83. The CAR of Embodiment 82, wherein the hinge domain is chosen from FcεRIIIa, CD8α, CD28 and IgG1.

[0161] Embodiment 84. The CAR of Embodiment 83, wherein the hinge domain is CD8α.

[0162] Embodiment 85 The CAR of any of Embodiments 82-84, wherein the transmembrane domain is chosen from alpha, beta or zeta chain of the T-cell receptor, CD28, CD3 epsilon, CD45, CD4, CD5, CD9, CD16, CD22, CD33, CD37, CD64, CDS0, CD86, CD134, CD137 and CD154.

[0163] Embodiment 86. The CAR of Embodiment 85, wherein the transmembrane domain is CD28.

[0164] Embodiment 87. The CAR of any of Embodiments 82-86, wherein the cytoplasmic signaling domain is chosen from CD8, CD3ζ, CD3δ, CD3γ, CD3ε, CD22, CD32, DAP10, DAP12, CD66d, CD79a, CD79b, FcγRIγ, FcγRIIIγ, FcεRIβ, FcεRIγ, FcRγ, FcRβ, and FcRε.

[0165] Embodiment 88. The CAR of Embodiment 87, wherein the cytoplasmic signaling domain is CD3ζ.

[0166] Embodiment 89. The CAR of any of Embodiments 82-88, wherein one co-stimulatory domain is chosen from 4-1BB, CD28, and ICOS.

[0167] Embodiment 90. The CAR of Embodiment 89, wherein the costimulatory domain is CD28.

[0168] Embodiment 91. The CAR of Embodiment 89, wherein the costimulatory domain is 4-1BB.

[0169] Embodiment 92. The CAR of Embodiment 89, comprising two or more costimulatory domains.

[0170] Embodiment 93. The CAR of Embodiment 89, wherein two of the costimulatory domains are CD28 and 4-1BB.

[0171] Embodiment 94. The CAR of Embodiment 82, comprising a sequence chosen from SEQ ID NOs: 1539-1598.

[0172] Embodiment 95. A nucleotide sequence encoding any of the polypeptides, scFvs, mAbs, or CARs of any of Embodiments 1-94.

[0173] Embodiment 96. A vector comprising the nucleotide sequence of Embodiment 95.

[0174] Embodiment 97. The vector of Embodiment 96, wherein the vector is a lentiviral vector.

[0175] Embodiment 98. The vector of Embodiment 97, wherein the lentiviral vector comprises a VSVG domain.

[0176] Embodiment 99. An engineered immune effector cell expressing at the cell surface a CAR of any one of Embodiment 81-94.

[0177] Embodiment 100. The engineered immune effector cell of Embodiment 99, wherein the engineered immune effector cell expresses at the cell surface:
[0178] a first polymorphic variant of a human cancer cell antigen; and
[0179] a CAR that is selective for a second polymorphic over the first polymorphic variant of the antigen.

[0180] Embodiment 101. The engineered immune effector cell of Embodiment 99, wherein the cell is a primary cell.

[0181] Embodiment 102. The engineered immune effector cell of Embodiment 99, wherein the cell is derived from:
[0182] an induced pluripotent stem cell (iPSC);
[0183] cord blood;
[0184] peripheral blood; or
[0185] an immortalized cell line.

[0186] Embodiment 103. The engineered immune effector cell of Embodiment 102, wherein the immortalized cell line is NK-92.

[0187] Embodiment 104. The engineered immune cell of any of Embodiments 99-103, wherein the cell is chosen from a T cell, an natural killer (NK) cell, an invariant natural killer T (iNKT) cell, a macrophage, and a dendritic cell.

[0188] Embodiment 105. The engineered immune effector cell of Embodiment 104, wherein the cell is a T cell.

[0189] Embodiment 106. The engineered immune effector cell of Embodiment 105, wherein the T cell is chosen from an inflammatory T-lymphocyte, a cytotoxic T-lymphocyte, a regulatory T-lymphocyte, or a helper T-lymphocyte.

[0190] Embodiment 107. The engineered immune effector cell of Embodiment 105, wherein the engineered immune effector cell is deficient in a subunit of the T cell receptor complex.

[0191] Embodiment 108. The engineered immune effector cell of Embodiment 107, wherein the subunit of the T cell receptor complex is chosen from TCRα (TRAC), TCRβ, TCRδ, TCRγ, CD3ε, CD3γ, CD3δ, and CD3ζ.

[0192] Embodiment 109. The engineered immune effector cell of any of Embodiments 99-108, wherein the engineered immune effector cell is deficient in a cell surface protein that is the target of the CAR.

[0193] Embodiment 110. The engineered immune effector cell of Embodiment 104, wherein the engineered immune effector cell is an NK cell.

[0194] Embodiment 111. The engineered immune effector cell of Embodiment 110 wherein the engineered immune effector cell is a memory-like (ML) NK cell.

[0195] Embodiment 112. The engineered immune effector cell of Embodiment 111, wherein the engineered immune effector cell is a cytokine-induced memory-like (CIML) NK cell.

[0196] Embodiment 113. The engineered immune effector cell of Embodiment 104, wherein the engineered immune effector cell is an iNKT cell.

[0197] Embodiment 114. A method of treatment of a subject in need thereof, who has a first polymorphic variant of an antigen on the surface of a target cell, comprising:
[0198] a. optionally, treating the subject with one or more conditioning regimens to deplete the subject of target cells bearing the first polymorphic variant of the antigen;
[0199] b. administering to the subject either:
   [0200] a population of engineered immune effector cells that express a chimeric antigen receptor (CAR) that selectively binds the first polymorphic variant of the antigen on the surface of the target cell; or
   [0201] a monoclonal antibody (mAb), or antigen-binding fragment thereof, that selectively binds the first polymorphic variant of the antigen on the surface of the target cell; or
   [0202] an antibody-drug conjugate (ADC) comprising monoclonal antibody (mAb), or antigen-binding fragment thereof, that selectively binds the first polymorphic variant of the antigen on the surface of the target cell; and
[0203] c. administering to the subject a population of donor hematopoietic cells, a plurality of which comprise a second polymorphic variant of the antigen;
[0204] wherein the administering of the hematopoietic cells, and the administering of the CAR-expressing cells, mAb, or ADC, may be done concurrently, or sequentially in either order.

[0205] Embodiment 115. A method of immunotherapy of a human subject in need thereof, who has a first polymorphic variant of an antigen on the surface of a target cell, comprising:
[0206] a. optionally, treating the subject with one or more conditioning regimens to deplete the subject of target cells bearing the first polymorphic variant of the antigen;
[0207] b. administering to the subject a population of donor hematopoietic cells, a plurality of which comprise a second polymorphic variant of the antigen; and
[0208] c. administering to the subject:
   [0209] a population of engineered immune effector cells that express a chimeric antigen receptor (CAR) that specifically binds the first polymorphic variant of an antigen on the surface of a target cell; or
   [0210] a monoclonal antibody (mAb) or antigen-binding fragment thereof, that selectively binds the first polymorphic variant of the antigen on the surface of the target cell; or
   [0211] an antibody-drug conjugate (ADC) comprising a monoclonal antibody (mAb), or antigen-binding fragment thereof, that selectively binds the first polymorphic variant of the antigen on the surface of the target cell.

[0212] Embodiment 116. A method of treatment of a subject in need thereof, who has a first polymorphic variant of an antigen on the surface of a target cell, comprising:
[0213] a. administering to the subject:
   [0214] a population of engineered immune effector cells that express a chimeric antigen receptor (CAR) which binds the antigen on the surface of the target cell; or
   [0215] a monoclonal antibody (mAb) which binds the antigen on the surface of the target cell; or
   [0216] an antibody-drug conjugate (ADC) comprising a monoclonal antibody (mAb) which binds the antigen on the surface of the target cell; and
[0217] b. optionally, treating the subject with one or more conditioning regimens to deplete the subject of target cells bearing the first polymorphic variant of the antigen;
[0218] c. administering to the subject either:
   [0219] a population of engineered immune effector cells that express a chimeric antigen receptor (CAR) that selectively binds the first polymorphic variant of the antigen on the surface of the target cell; or
   [0220] a monoclonal antibody (mAb), or antigen-binding fragment thereof, that selectively binds the first polymorphic variant of the antigen on the surface of the target cell; or
   [0221] an antibody-drug conjugate (ADC) comprising a monoclonal antibody (mAb), or antigen-binding fragment thereof, that selectively binds the first polymorphic variant of the antigen on the surface of the target cell; and
[0222] d. administering to the subject a population of donor hematopoietic cells, a plurality of which comprise a second polymorphic variant of the antigen;
   wherein the administering of the hematopoietic cells, and the administering of the CAR-expressing cells, mAb, or ADC, may be done concurrently, or sequentially in either order.

[0223] Embodiment 117. The method of any of Embodiments 114-116, wherein the subject is a human.

[0224] Embodiment 118. The method of any of Embodiments 114-117, wherein the binding is at least 2-fold selective.

[0225] Embodiment 119. The method of Embodiment 118, wherein the binding is at east 10-fold selective.

[0226] Embodiment 120. The method of Embodiment 119, wherein the binding is at least 30-fold selective.

[0227] Embodiment 121. The method of any of Embodiments 114-120, wherein the antigen is chosen from CD33, CLL-1, and FLT3.

[0228] Embodiment 122. The method of Embodiment 121, wherein the antigen is CD33.

[0229] Embodiment 123. The method of Embodiment 122, wherein the first polymorphic variant of CD33 is R69 and the second polymorphic variant of CD33 is G69; or the first polymorphic variant of CD33 is G69 and the second polymorphic variant of CD33 is R69.

[0230] Embodiment 124. The method of Embodiment 121, wherein the antigen is FLT3.

[0231] Embodiment 125. The method of Embodiment 124, wherein the first polymorphic variant of FLT3 is T227 and the second polymorphic variant of FLT3 is M227; or first polymorphic variant of FLT3 is M227 and the second polymorphic variant of FLT3 is T227.

[0232] Embodiment 126. The method of Embodiment 121, wherein the antigen is CLL-1.

[0233] Embodiment 127. The method of Embodiment 126, wherein the first polymorphic variant of CLL-1 is K224 and the second polymorphic variant of CLL-1 is Q244; or first polymorphic variant of CLL-1 is Q224 and the second polymorphic variant of CLL-1 is K244.

[0234] Embodiment 128. The method of any of Embodiments 114-127, wherein the subject is concurrently administered both the population of engineered immune effector cells and the population of hematopoietic cells.

[0235] Embodiment 128. The method of any of Embodiments 114-127, wherein the subject is sequentially administered the population of hematopoietic cells, and the population of engineered immune effector cells, mAb, or ADC.

[0236] Embodiment 130. The method of any of Embodiments 114-127, wherein the subject is sequentially administered the population of engineered immune effector cells, mAb, or ADC, and the population of hematopoietic cells.

[0237] Embodiment 131. The method of any of Embodiments 114-130, wherein the subject is treated with one or more conditioning regimens to deplete the subject of target cells bearing the first polymorphic variant of the antigen before administering of the hematopoietic cells.

[0238] Embodiment 132. The method of any of Embodiments 114-130, wherein the subject has already been conditioned with one or more conditioning regimens to deplete the subject of target cells bearing the first polymorphic variant of the antigen.

[0239] Embodiment 133. The method of any of Embodiments 114-12, wherein the hematopoietic cells are hematopoietic stem cells and/or hematopoietic progenitor cells.

[0240] Embodiment 134. The method of any of Embodiments 114-133, wherein the subject is administered a population of engineered immune effector cells that express a chimeric antigen receptor (CAR) that selectively binds the first polymorphic variant of the antigen on the surface of the target cell.

[0241] Embodiment 135. The method of Embodiment 134, wherein the engineered immune effector cells are derived from the subject (i.e., autologous) and the hematopoietic cells are derived from a donor (i.e., allogeneic).

[0242] Embodiment 136. The method of Embodiment 134, wherein the engineered immune effector cells and hematopoietic cells are derived from a single donor.

[0243] Embodiment 137. The method of Embodiment 134, wherein the engineered immune cells are derived from a first donor and hematopoietic cells are derived from a second donor.

[0244] Embodiment 138. The method of any of Embodiments 134-137, wherein the chimeric antigen receptor (CAR) comprises a polypeptide of any of Embodiments 1-69.

[0245] Embodiment 139. The method of Embodiment any of Embodiments 134-137, wherein the chimeric antigen receptor (CAR) comprises the scFv of Embodiment 70.

[0246] Embodiment 140. The method of any of Embodiments 134-137, wherein the chimeric antigen receptor (CAR) is a CAR of any of Embodiments 81-94.

[0247] Embodiment 141. The method of any of Embodiments 134-137, wherein the engineered immune effector cell is one of any of any of Embodiments 99-113.

[0248] Embodiment 142. The method of any of Embodiments 114-133, wherein the subject is administered a monoclonal antibody (mAb), or antigen-binding fragment thereof, that selectively binds the first polymorphic variant of the antigen on the surface of the target cell.

[0249] Embodiment 143. The method of Embodiment 142, wherein the monoclonal antibody (mAb) comprises a polypeptide of any of Embodiments 1-69.

[0250] Embodiment 144. The method of Embodiment 116, wherein the monoclonal antibody (mAb) is a mAb of any of Embodiments 71-77.

[0251] Embodiment 145. The method of any of Embodiments 114-133, wherein the subject is administered an antibody-drug conjugate (ADC) comprising a monoclonal antibody (mAb), or antigen-binding fragment thereof, that selectively binds the first polymorphic variant of the antigen on the surface of the target cell.

[0252] Embodiment 146. The method of any of Embodiments 142-145, wherein the mAb or ADC is administered prophylactically after transplant to prevent relapse.

[0253] Embodiment 147. The method of any of Embodiments 114-146, additionally comprising genotyping the subject and donor to ensure the HSC donor and patient express different variants of the target antigen.

[0254] Embodiment 148. The method of Embodiment 147, wherein the genotyping is done using either a protein- (FACS) or DNA- (PCR) based assay.

[0255] Embodiment 149. The method of Embodiment 147, wherein the patient is genotyped after relapse from transplant.

[0256] Embodiment 150. The method of Embodiment 147, wherein the patient is genotyped before transplant.

[0257] Embodiment 151. The method of Embodiment 147, wherein the hematopoietic cell donor is genotyped before hematopoietic cell transplant.

[0258] Embodiment 152. The method of any of Embodiments 137-147, wherein the immune effector cell donor is genotyped before transplant of the population of engineered immune effector cells that express the CAR.

[0259] Embodiment 153. The method of any of Embodiments 137-147, wherein the immune effector cell donor is genotyped before hematopoietic cell transplant.

[0260] Embodiment 154. A polypeptide which binds CD33, comprising:
[0261] three heavy chain variable (V_{H}) domain CDRs: HCDR1, HCDR2, and HCDR3; and/or
[0262] three light chain variable (V_{L}) domain CDRs: LCDR1, LCDR2, and LCDR3; wherein
[0263] HCDR1 comprises an amino acid sequence with at least 95% sequence identity to an amino acid sequence chosen from SEQ ID NOs: 705-7559 and 1979-1981;
[0264] HCDR2 comprises an amino acid sequence with at least 95% sequence identity to an amino acid sequence chosen from SEQ ID NOs: 760-814 and 1982-1984;
[0265] HCDR3 comprises an amino acid sequence with at least 95% sequence identity to an amino acid sequence chosen from SEQ ID NOs: 815-869 and 1985-1987;
[0266] LCDR1 comprises an amino acid sequence with at least 95% sequence identity to an amino acid sequence chosen from SEQ ID NOs: 870-924 and 1988-1990;
[0267] LCDR2 comprises an amino acid sequence with at least 95% sequence identity to an amino acid sequence chosen from SEQ ID NOs: 925-979 and 1991-1993; and
[0268] LCDR3 comprises an amino acid sequence with at least 95% sequence identity to an amino acid sequence chosen from SEQ ID NOs: 980-1034 and 1994-1996.

[0269] Embodiment 155. The polypeptide of Embodiment 154, comprising a combination of HCDR1, HCDR2, HCDR3, LCDR1, LCDR2, and LCDR3, respectively, chosen from:
[0270] SEQ ID NO.s: 705, 760, 815, 870, 925, and 980;
[0271] SEQ ID NO.s: 706, 761, 816, 871, 926, and 981;
[0272] SEQ ID NO.s: 707, 762, 817, 872, 927, and 982;
[0273] SEQ ID NO.s: 708, 763, 818, 873, 928, and 983;
[0274] SEQ ID NO.s: 709, 764, 819, 874, 929, and 984;
[0275] SEQ ID NO.s: 710, 765, 820, 875, 930, and 985;
[0276] SEQ ID NO.s: 711, 766, 821, 876, 931, and 986;
[0277] SEQ ID NO.s: 712, 767, 822, 877, 932, and 987;
[0278] SEQ ID NO.s: 713, 768, 823, 878, 933, and 988;
[0279] SEQ ID NO.s: 714, 769, 824, 879, 934, and 989;
[0280] SEQ ID NO.s: 715, 770, 825, 880, 935, and 990;
[0281] SEQ ID NO.s: 716, 771, 826, 881, 936, and 991;
[0282] SEQ ID NO.s: 717, 772, 827, 882, 937, and 992;
[0283] SEQ ID NO.s: 718, 773, 828, 883, 938, and 993;
[0284] SEQ ID NO.s: 719, 774, 829, 884, 939, and 994;
[0285] SEQ ID NO.s: 720, 775, 830, 885, 940, and 995;
[0286] SEQ ID NO.s: 721, 776, 831, 886, 941, and 996;
[0287] SEQ ID NO.s: 722, 777, 832, 887, 942, and 997;
[0288] SEQ ID NO.s: 723, 778, 833, 888, 943, and 998;
[0289] SEQ ID NO.s: 724, 779, 834, 889, 944, and 999;
[0290] SEQ ID NO.s: 725, 780, 835, 890, 945, and 1000;
[0291] SEQ ID NO.s: 726, 781, 836, 891, 946, and 1001;
[0292] SEQ ID NO.s: 727, 782, 837, 892, 947, and 1002;
[0293] SEQ ID NO.s: 728, 783, 838, 893, 948, and 1003;
[0294] SEQ ID NO.s: 729, 784, 839, 894, 949, and 1004;
[0295] SEQ ID NO.s: 730, 785, 840, 895, 950, and 1005;
[0296] SEQ ID NO.s: 731, 786, 841, 896, 951, and 1006;
[0297] SEQ ID NO.s: 732, 787, 842, 897, 952, and 1007;
[0298] SEQ ID NO.s: 733, 788, 843, 898, 953, and 1008;
[0299] SEQ ID NO.s: 734, 789, 844, 899, 954, and 1009;
[0300] SEQ ID NO.s: 735, 790, 845, 900, 955, and 1010;
[0301] SEQ ID NO.s: 736, 791, 846, 901, 956, and 1011;
[0302] SEQ ID NO.s: 737, 792, 847, 902, 957, and 1012;
[0303] SEQ ID NO.s: 738, 793, 848, 903, 958, and 1013;
[0304] SEQ ID NO.s: 739, 794, 849, 904, 959, and 1014;
[0305] SEQ ID NO.s: 740, 795, 850, 905, 960, and 1015;
[0306] SEQ ID NO.s: 741, 796, 851, 906, 961, and 1016;
[0307] SEQ ID NO.s: 742, 797, 852, 907, 962, and 1017;
[0308] SEQ ID NO.s: 743, 798, 853, 908, 963, and 1018;
[0309] SEQ ID NO.s: 744, 799, 854, 909, 964, and 1019;
[0310] SEQ ID NO.s: 745, 800, 855, 910, 965, and 1020;
[0311] SEQ ID NO.s: 746, 801, 856, 911, 966, and 1021;
[0312] SEQ ID NO.s: 747, 802, 857, 912, 967, and 1022;
[0313] SEQ ID NO.s: 748, 803, 858, 913, 968, and 1023;
[0314] SEQ ID NO.s: 749, 804, 859, 914, 969, and 1024;
[0315] SEQ ID NO.s: 750, 805, 860, 915, 970, and 1025;
[0316] SEQ ID NO.s: 751, 806, 861, 916, 971, and 1026;
[0317] SEQ ID NO.s: 752, 807, 862, 917, 972, and 1027;
[0318] SEQ ID NO.s: 753, 808, 863, 918, 973, and 1028;
[0319] SEQ ID NO.s: 754, 809, 864, 919, 974, and 1029;
[0320] SEQ ID NO.s: 755, 810, 865, 920, 975, and 1030;
[0321] SEQ ID NO.s: 756, 811, 866, 921, 976, and 1031;
[0322] SEQ ID NO.s: 757, 812, 867, 922, 977, and 1032;
[0323] SEQ ID NO.s: 758, 813, 868, 923, 978, and 1033;
[0324] SEQ ID NO.s: 759, 814, 869, 924, 979, and 1034;
[0325] SEQ ID NO.s: 1979, 1982, 1985, 1988, 1991, and 1994;
[0326] SEQ ID NO.s: 1980, 1983, 1986, 1989, 1992, and 1995; and
[0327] SEQ ID NO.s: 1981, 1984, 1987, 1990, 1993, and 1996;
[0328] or a combination of HCDR1, HCDR2, HCDR3, LCDR1, LCDR2, and LCDR3 with at least 95% sequence identity to the foregoing.

[0329] Embodiment 156. The polypeptide of Embodiment 154, comprising a V_{H} domain and V_{L} domain, wherein:
[0330] the V_{H} domain comprises an amino acid sequence with at least 95% sequence identity to an amino acid sequence chosen from SEQ ID NOs: 1035-1089 and 1997-1999; and/or
[0331] the V_{L} domain comprises an amino acid sequence with at least 95% sequence identity to an amino acid sequence chosen from SEQ ID NOs: 1090-1144 and 2000-2002.

[0332] Embodiment 157. The polypeptide of Embodiment 156, comprising a combination of V_{H} and V_{L} domains chosen from:
[0333] SEQ ID NO.s: 1035 and 1090;
[0334] SEQ ID NO.s: 1036 and 1091;
[0335] SEQ ID NO.s: 1037 and 1092;
[0336] SEQ ID NO.s: 1038 and 1093;
[0337] SEQ ID NO.s: 1039 and 1094;
[0338] SEQ ID NO.s: 1040 and 1095;
[0339] SEQ ID NO.s: 1041 and 1096;
[0340] SEQ ID NO.s: 1042 and 1097;
[0341] SEQ ID NO.s: 1043 and 1098;
[0342] SEQ ID NO.s: 1044 and 1099;
[0343] SEQ ID NO.s: 1045 and 1100;
[0344] SEQ ID NO.s: 1046 and 1101;
[0345] SEQ ID NO.s: 1047 and 1102;
[0346] SEQ ID NO.s: 1048 and 1103;
[0347] SEQ ID NO.s: 1049 and 1104;
[0348] SEQ ID NO.s: 1050 and 1105;
[0349] SEQ ID NO.s: 1051 and 1106;
[0350] SEQ ID NO.s: 1052 and 1107;
[0351] SEQ ID NO.s: 1053 and 1108;
[0352] SEQ ID NO.s: 1054 and 1109;
[0353] SEQ ID NO.s: 1055 and 1110;
[0354] SEQ ID NO.s: 1056 and 1111;
[0355] SEQ ID NO.s: 1057 and 1112;
[0356] SEQ ID NO.s: 1058 and 1113;
[0357] SEQ ID NO.s: 1059 and 1114;
[0358] SEQ ID NO.s: 1060 and 1115;
[0359] SEQ ID NO.s: 1061 and 1116;
[0360] SEQ ID NO.s: 1062 and 1117;
[0361] SEQ ID NO.s: 1063 and 1118;
[0362] SEQ ID NO.s: 1064 and 1119;
[0363] SEQ ID NO.s: 1065 and 1120;
[0364] SEQ ID NO.s: 1066 and 1121;
[0365] SEQ ID NO.s: 1067 and 1122;
[0366] SEQ ID NO.s: 1068 and 1123;
[0367] SEQ ID NO.s: 1069 and 1124;
[0368] SEQ ID NO.s: 1070 and 1125;
[0369] SEQ ID NO.s: 1071 and 1126;
[0370] SEQ ID NO.s: 1072 and 1127;
[0371] SEQ ID NO.s: 1073 and 1128;
[0372] SEQ ID NO.s: 1074 and 1129;
[0373] SEQ ID NO.s: 1075 and 1130;
[0374] SEQ ID NO.s: 1076 and 1131;
[0375] SEQ ID NO.s: 1077 and 1132;
[0376] SEQ ID NO.s: 1078 and 1133;
[0377] SEQ ID NO.s: 1079 and 1134;
[0378] SEQ ID NO.s: 1080 and 1135;
[0379] SEQ ID NO.s: 1081 and 1136;
[0380] SEQ ID NO.s: 1082 and 1137;
[0381] SEQ ID NO.s: 1083 and 1138;
[0382] SEQ ID NO.s: 1084 and 1139;
[0383] SEQ ID NO.s: 1085 and 1140;
[0384] SEQ ID NO.s: 1086 and 1141;
[0385] SEQ ID NO.s: 1087 and 1142;
[0386] SEQ ID NO.s: 1088 and 1143;
[0387] SEQ ID NO.s: 1089 and 1144;
[0388] SEQ ID NO.s: 1997 and 2000;
[0389] SEQ ID NO.s: 1998 and 2001; and
[0390] SEQ ID NO.s: 1999 and 2002;
[0391] or a combination of V_{H} and V_{L} domains with at least 95% sequence identity to the foregoing.

[0392] Embodiment 158. A polypeptide which binds CLL-1, comprising:
[0393] three heavy chain variable (V_{H}) domain CDRs: HCDR1, HCDR2, and HCDR3; and/or
[0394] three light chain variable (V_{L}) domain CDRs: LCDR1, LCDR2, and LCDR3; wherein
[0395] HCDR1 comprises an amino acid sequence with at least 95% sequence identity to an amino acid sequence chosen from SEQ ID NOs: 1145-1191 and 2003-2009;
[0396] HCDR2 comprises an amino acid sequence with at least 95% sequence identity to an amino acid sequence chosen from SEQ ID NOs: 1192-1238 and 2010-2016;
[0397] HCDR3 comprises an amino acid sequence with at least 95% sequence identity to an amino acid sequence chosen from SEQ ID NOs: 1239-1285 and 2017-2023;
[0398] LCDR1 comprises an amino acid sequence with at least 95% sequence identity to an amino acid sequence chosen from SEQ ID NOs: 1286-1332 and 2024-2030;
[0399] LCDR2 comprises an amino acid sequence with at least 95% sequence identity to an amino acid sequence chosen from SEQ ID NOs: 1333-1379 and 2031-2037; and
[0400] LCDR3 comprises an amino acid sequence with at least 95% sequence identity to an amino acid sequence chosen from SEQ ID NOs: 1380-1426 and 2038-2044.

[0401] Embodiment 159. The polypeptide of Embodiment 158, comprising a combination of HCDR1, HCDR2, HCDR3, LCDR1, LCDR2, and LCDR3, respectively, chosen from:
[0402] SEQ ID NO.s: 1145, 1192, 1239, 1286, 1333, and 1380;
[0403] SEQ ID NO.s: 1146, 1193, 1240, 1287, 1334, and 1381;
[0404] SEQ ID NO.s: 1147, 1194, 1241, 1288, 1335, and 1382;
[0405] SEQ ID NO.s: 1148, 1195, 1242, 1289, 1336, and 1383;
[0406] SEQ ID NO.s: 1149, 1196, 1243, 1290, 1337, and 1384;
[0407] SEQ ID NO.s: 1150, 1197, 1244, 1291, 1338, and 1385;
[0408] SEQ ID NO.s: 1151, 1198, 1245, 1292, 1339, and 1386;
[0409] SEQ ID NO.s: 1152, 1199, 1246, 1293, 1340, and 1387;
[0410] SEQ ID NO.s: 1153, 1200, 1247, 1294, 1341, and 1388;
[0411] SEQ ID NO.s: 1154, 1201, 1248, 1295, 1342, and 1389;
[0412] SEQ ID NO.s: 1155, 1202, 1249, 1296, 1343, and 1390;
[0413] SEQ ID NO.s: 1156, 1203, 1250, 1297, 1344, and 1391;
[0414] SEQ ID NO.s: 1157, 1204, 1251, 1298, 1345, and 1392;
[0415] SEQ ID NO.s: 1158, 1205, 1252, 1299, 1346, and 1393;
[0416] SEQ ID NO.s: 1159, 1206, 1253, 1300, 1347, and 1394;
[0417] SEQ ID NO.s: 1160, 1207, 1254, 1301, 1348, and 1395;
[0418] SEQ ID NO.s: 1161, 1208, 1255, 1302, 1349, and 1396;
[0419] SEQ ID NO.s: 1162, 1209, 1256, 1303, 1350, and 1397;
[0420] SEQ ID NO.s: 1163, 1210, 1257, 1304, 1351, and 1398;
[0421] SEQ ID NO.s: 1164, 1211, 1258, 1305, 1352, and 1399;
[0422] SEQ ID NO.s: 1165, 1212, 1259, 1306, 1353, and 1400;
[0423] SEQ ID NO.s: 1166, 1213, 1260, 1307, 1354, and 1401;
[0424] SEQ ID NO.s: 1167, 1214, 1261, 1308, 1355, and 1402;
[0425] SEQ ID NO.s: 1168, 1215, 1262, 1309, 1356, and 1403;
[0426] SEQ ID NO.s: 1169, 1216, 1263, 1310, 1357, and 1404;
[0427] SEQ ID NO.s: 1170, 1217, 1264, 1311, 1358, and 1405;
[0428] SEQ ID NO.s: 1171, 1218, 1265, 1312, 1359, and 1406;
[0429] SEQ ID NO.s: 1172, 1219, 1266, 1313, 1360, and 1407;
[0430] SEQ ID NO.s: 1173, 1220, 1267, 1314, 1361, and 1408;
[0431] SEQ ID NO.s: 1174, 1221, 1268, 1315, 1362, and 1409;
[0432] SEQ ID NO.s: 1175, 1222, 1269, 1316, 1363, and 1410;
[0433] SEQ ID NO.s: 1176, 1223, 1270, 1317, 1364, and 1411;
[0434] SEQ ID NO.s: 1177, 1224, 1271, 1318, 1365, and 1412;
[0435] SEQ ID NO.s: 1178, 1225, 1272, 1319, 1366, and 1413;
[0436] SEQ ID NO.s: 1179, 1226, 1273, 1320, 1367, and 1414;
[0437] SEQ ID NO.s: 1180, 1227, 1274, 1321, 1368, and 1415;
[0438] SEQ ID NO.s: 1181, 1228, 1275, 1322, 1369, and 1416;
[0439] SEQ ID NO.s: 1182, 1229, 1276, 1323, 1370, and 1417;
[0440] SEQ ID NO.s: 1183, 1230, 1277, 1324, 1371, and 1418;
[0441] SEQ ID NO.s: 1184, 1231, 1278, 1325, 1372, and 1419;
[0442] SEQ ID NO.s: 1185, 1232, 1279, 1326, 1373, and 1420;
[0443] SEQ ID NO.s: 1186, 1233, 1280, 1327, 1374, and 1421;
[0444] SEQ ID NO.s: 1187, 1234, 1281, 1328, 1375, and 1422;
[0445] SEQ ID NO.s: 1188, 1235, 1282, 1329, 1376, and 1423;
[0446] SEQ ID NO.s: 1189, 1236, 1283, 1330, 1377, and 1424;
[0447] SEQ ID NO.s: 1190, 1237, 1284, 1331, 1378, and 1425;
[0448] SEQ ID NO.s: 1191, 1238, 1285, 1332, 1379, and 1426;
[0449] SEQ ID NO.s: 2003, 2010, 2017, 2024, 2031, and 2038;
[0450] SEQ ID NO.s: 2004, 2011, 2018, 2025, 2032, and 2039;
[0451] SEQ ID NO.s: 2005, 2012, 2019, 2026, 2033, and 2040;
[0452] SEQ ID NO.s: 2006, 2013, 2020, 2027, 2034, and 2041;
[0453] SEQ ID NO.s: 2007, 2014, 2021, 2028, 2035, and 2042;
[0454] SEQ ID NO.s: 2008, 2015, 2022, 2029, 2036, and 2043; and
[0455] SEQ ID NO.s: 2009, 2016, 2023, 2030, 2037, and 2044;
[0456] or a combination of HCDR1, HCDR2, HCDR3, LCDR1, LCDR2, and LCDR3 with at least 95% sequence identity to the foregoing.

[0457] Embodiment 160. The polypeptide of Embodiment 158, comprising a V_{H} domain and V_{L} domain, wherein:
[0458] the V_{H} domain comprises an amino acid sequence with at least 95% sequence identity to an amino acid sequence chosen from SEQ ID NOs: 1427-1473 and 2045-2051; and/or
[0459] the V_{L} domain comprises an amino acid sequence with at least 95% sequence identity to an amino acid sequence chosen from SEQ ID NOs: 1474-1520 and 2052-2058.

[0460] Embodiment 161. The polypeptide of Embodiment 160, comprising a combination of V_{H} and V_{L} domains chosen from:
[0461] SEQ ID NO.s: 1427 and 1474;
[0462] SEQ ID NO.s: 1428 and 1475;
[0463] SEQ ID NO.s: 1429 and 1476;
[0464] SEQ ID NO.s: 1430 and 1477;
[0465] SEQ ID NO.s: 1431 and 1478;
[0466] SEQ ID NO.s: 1432 and 1479;
[0467] SEQ ID NO.s: 1433 and 1480;
[0468] SEQ ID NO.s: 1434 and 1481;
[0469] SEQ ID NO.s: 1435 and 1482;
[0470] SEQ ID NO.s: 1436 and 1483;
[0471] SEQ ID NO.s: 1437 and 1484;
[0472] SEQ ID NO.s: 1438 and 1485;
[0473] SEQ ID NO.s: 1439 and 1486;
[0474] SEQ ID NO.s: 1440 and 1487;
[0475] SEQ ID NO.s: 1441 and 1488;
[0476] SEQ ID NO.s: 1442 and 1489;
[0477] SEQ ID NO.s: 1443 and 1490;
[0478] SEQ ID NO.s: 1444 and 1491;
[0479] SEQ ID NO.s: 1445 and 1492;
[0480] SEQ ID NO.s: 1446 and 1493;
[0481] SEQ ID NO.s: 1447 and 1494;
[0482] SEQ ID NO.s: 1448 and 1495;
[0483] SEQ ID NO.s: 1449 and 1496;
[0484] SEQ ID NO.s: 1450 and 1497;
[0485] SEQ ID NO.s: 1451 and 1498;
[0486] SEQ ID NO.s: 1452 and 1499;
[0487] SEQ ID NO.s: 1453 and 1500;
[0488] SEQ ID NO.s: 1454 and 1501;
[0489] SEQ ID NO.s: 1455 and 1502;
[0490] SEQ ID NO.s: 1456 and 1503;
[0491] SEQ ID NO.s: 1457 and 1504;
[0492] SEQ ID NO.s: 1458 and 1505;
[0493] SEQ ID NO.s: 1459 and 1506;
[0494] SEQ ID NO.s: 1460 and 1507;
[0495] SEQ ID NO.s: 1461 and 1508;
[0496] SEQ ID NO.s: 1462 and 1509;
[0497] SEQ ID NO.s: 1463 and 1510;
[0498] SEQ ID NO.s: 1464 and 1511;
[0499] SEQ ID NO.s: 1465 and 1512;
[0500] SEQ ID NO.s: 1466 and 1513;
[0501] SEQ ID NO.s: 1467 and 1514;
[0502] SEQ ID NO.s: 1468 and 1515;
[0503] SEQ ID NO.s: 1469 and 1516;
[0504] SEQ ID NO.s: 1470 and 1517;
[0505] SEQ ID NO.s: 1471 and 1518;
[0506] SEQ ID NO.s: 1472 and 1519;
[0507] SEQ ID NO.s: 1473 and 1520;
[0508] SEQ ID NO.s: 2045 and 2052;
[0509] SEQ ID NO.s: 2046 and 2053;
[0510] SEQ ID NO.s: 2047 and 2054;
[0511] SEQ ID NO.s: 2048 and 2055;
[0512] SEQ ID NO.s: 2049 and 2056;
[0513] SEQ ID NO.s: 2050 and 2057; and
[0514] SEQ ID NO.s: 2051 and 2058;
[0515] or a combination of V_{H} and V_{L} domains with at least 95% sequence identity to the foregoing.

[0516] Embodiment 162. A polypeptide which binds FLT3, comprising: three heavy chain variable (V_{H}) domain CDRs: HCDR1, HCDR2, and HCDR3; and/or three light chain variable (V_{L}) domain CDRs: LCDR1, LCDR2, and LCDR3; wherein
[0517] HCDR1 comprises an amino acid sequence with at least 95% sequence identity to an amino acid sequence chosen from SEQ ID NOs: 2059-2152;
[0518] HCDR2 comprises an amino acid sequence with at least 95% sequence identity to an amino acid sequence chosen from SEQ ID NOs: 2153-2246;
[0519] HCDR3 comprises an amino acid sequence with at least 95% sequence identity to an amino acid sequence chosen from SEQ ID NOs: 2247-2340;
[0520] LCDR1 comprises an amino acid sequence with at least 95% sequence identity to an amino acid sequence chosen from SEQ ID NOs: 2341-2434;
[0521] LCDR2 comprises an amino acid sequence with at least 95% sequence identity to an amino acid sequence chosen from SEQ ID NOs: 2435-2528; and
[0522] LCDR3 comprises an amino acid sequence with at least 95% sequence identity to an amino acid sequence chosen from SEQ ID NOs: 2529-2622.

[0523] Embodiment 163. The polypeptide of Embodiment 162, comprising a combination of HCDR1, HCDR2, HCDR3, LCDR1, LCDR2, and LCDR3, respectively, chosen from:
[0524] SEQ ID NO.s: 2059, 2153, 2247, 2341, 2435, and 2529;
[0525] SEQ ID NO.s: 2060, 2154, 2248, 2342, 2436, and 2530;
[0526] SEQ ID NO.s: 2061, 2155, 2249, 2343, 2437, and 2531;
[0527] SEQ ID NO.s: 2062, 2156, 2250, 2344, 2438, and 2532;
[0528] SEQ ID NO.s: 2063, 2157, 2251, 2345, 2439, and 2533;
[0529] SEQ ID NO.s: 2064, 2158, 2252, 2346, 2440, and 2534;
[0530] SEQ ID NO.s: 2065, 2159, 2253, 2347, 2441, and 2535;
[0531] SEQ ID NO.s: 2066, 2160, 2254, 2348, 2442, and 2536;
[0532] SEQ ID NO.s: 2067, 2161, 2255, 2349, 2443, and 2537;
[0533] SEQ ID NO.s: 2068, 2162, 2256, 2350, 2444, and 2538;
[0534] SEQ ID NO.s: 2069, 2163, 2257, 2351, 2445, and 2539;
[0535] SEQ ID NO.s: 2070, 2164, 2258, 2352, 2446, and 2540;
[0536] SEQ ID NO.s: 2071, 2165, 2259, 2353, 2447, and 2541;
[0537] SEQ ID NO.s: 2072, 2166, 2260, 2354, 2448, and 2542;
[0538] SEQ ID NO.s: 2073, 2167, 2261, 2355, 2449, and 2543;
[0539] SEQ ID NO.s: 2074, 2168, 2262, 2356, 2450, and 2544;
[0540] SEQ ID NO.s: 2075, 2169, 2263, 2357, 2451, and 2545;
[0541] SEQ ID NO.s: 2076, 2170, 2264, 2358, 2452, and 2546;
[0542] SEQ ID NO.s: 2077, 2171, 2265, 2359, 2453, and 2547;
[0543] SEQ ID NO.s: 2078, 2172, 2266, 2360, 2454, and 2548;
[0544] SEQ ID NO.s: 2079, 2173, 2267, 2361, 2455, and 2549;
[0545] SEQ ID NO.s: 2080, 2174, 2268, 2362, 2456, and 2550;
[0546] SEQ ID NO.s: 2081, 2175, 2269, 2363, 2457, and 2551;
[0547] SEQ ID NO.s: 2082, 2176, 2270, 2364, 2458, and 2552;
[0548] SEQ ID NO.s: 2083, 2177, 2271, 2365, 2459, and 2553;
[0549] SEQ ID NO.s: 2084, 2178, 2272, 2366, 2460, and 2554;
[0550] SEQ ID NO.s: 2085, 2179, 2273, 2367, 2461, and 2555;
[0551] SEQ ID NO.s: 2086, 2180, 2274, 2368, 2462, and 2556;
[0552] SEQ ID NO.s: 2087, 2181, 2275, 2369, 2463, and 2557;
[0553] SEQ ID NO.s: 2088, 2182, 2276, 2370, 2464, and 2558;
[0554] SEQ ID NO.s: 2089, 2183, 2277, 2371, 2465, and 2559;
[0555] SEQ ID NO.s: 2090, 2184, 2278, 2372, 2466, and 2560;
[0556] SEQ ID NO.s: 2091, 2185, 2279, 2373, 2467, and 2561;
[0557] SEQ ID NO.s: 2092, 2186, 2280, 2374, 2468, and 2562;
[0558] SEQ ID NO.s: 2093, 2187, 2281, 2375, 2469, and 2563;
[0559] SEQ ID NO.s: 2094, 2188, 2282, 2376, 2470, and 2564;
[0560] SEQ ID NO.s: 2095, 2189, 2283, 2377, 2471, and 2565;
[0561] SEQ ID NO.s: 2096, 2190, 2284, 2378, 2472, and 2566;
[0562] SEQ ID NO.s: 2097, 2191, 2285, 2379, 2473, and 2567;
[0563] SEQ ID NO.s: 2098, 2192, 2286, 2380, 2474, and 2568;
[0564] SEQ ID NO.s: 2099, 2193, 2287, 2381, 2475, and 2569;
[0565] SEQ ID NO.s: 2100, 2194, 2288, 2382, 2476, and 2570;
[0566] SEQ ID NO.s: 2101, 2195, 2289, 2383, 2477, and 2571;
[0567] SEQ ID NO.s: 2102, 2196, 2290, 2384, 2478, and 2572;
[0568] SEQ ID NO.s: 2103, 2197, 2291, 2385, 2479, and 2573;
[0569] SEQ ID NO.s: 2104, 2198, 2292, 2386, 2480, and 2574;
[0570] SEQ ID NO.s: 2105, 2199, 2293, 2387, 2481, and 2575;
[0571] SEQ ID NO.s: 2106, 2200, 2294, 2388, 2482, and 2576;
[0572] SEQ ID NO.s: 2107, 2201, 2295, 2389, 2483, and 2577;
[0573] SEQ ID NO.s: 2108, 2202, 2296, 2390, 2484, and 2578;
[0574] SEQ ID NO.s: 2109, 2203, 2297, 2391, 2485, and 2579;
[0575] SEQ ID NO.s: 2110, 2204, 2298, 2392, 2486, and 2580;
[0576] SEQ ID NO.s: 2111, 2205, 2299, 2393, 2487, and 2581;
[0577] SEQ ID NO.s: 2112, 2206, 2300, 2394, 2488, and 2582;
[0578] SEQ ID NO.s: 2113, 2207, 2301, 2395, 2489, and 2583;
[0579] SEQ ID NO.s: 2114, 2208, 2302, 2396, 2490, and 2584;
[0580] SEQ ID NO.s: 2115, 2209, 2303, 2397, 2491, and 2585;
[0581] SEQ ID NO.s: 2116, 2210, 2304, 2398, 2492, and 2586;
[0582] SEQ ID NO.s: 2117, 2211, 2305, 2399, 2493, and 2587;
[0583] SEQ ID NO.s: 2118, 2212, 2306, 2400, 2494, and 2588;
[0584] SEQ ID NO.s: 2119, 2213, 2307, 2401, 2495, and 2589;
[0585] SEQ ID NO.s: 2120, 2214, 2308, 2402, 2496, and 2590;
[0586] SEQ ID NO.s: 2121, 2215, 2309, 2403, 2497, and 2591;
[0587] SEQ ID NO.s: 2122, 2216, 2310, 2404, 2498, and 2592;
[0588] SEQ ID NO.s: 2123, 2217, 2311, 2405, 2499, and 2593;
[0589] SEQ ID NO.s: 2124, 2218, 2312, 2406, 2500, and 2594;
[0590] SEQ ID NO.s: 2125, 2219, 2313, 2407, 2501, and 2595;
[0591] SEQ ID NO.s: 2126, 2220, 2314, 2408, 2502, and 2596;
[0592] SEQ ID NO.s: 2127, 2221, 2315, 2409, 2503, and 2597;
[0593] SEQ ID NO.s: 2128, 2222, 2316, 2410, 2504, and 2598;
[0594] SEQ ID NO.s: 2129, 2223, 2317, 2411, 2505, and 2599;
[0595] SEQ ID NO.s: 2130, 2224, 2318, 2412, 2506, and 2600;
[0596] SEQ ID NO.s: 2131, 2225, 2319, 2413, 2507, and 2601;
[0597] SEQ ID NO.s: 2132, 2226, 2320, 2414, 2508, and 2602;
[0598] SEQ ID NO.s: 2133, 2227, 2321, 2415, 2509, and 2603;
[0599] SEQ ID NO.s: 2134, 2228, 2322, 2416, 2510, and 2604;
[0600] SEQ ID NO.s: 2135, 2229, 2323, 2417, 2511, and 2605;
[0601] SEQ ID NO.s: 2136, 2230, 2324, 2418, 2512, and 2606;
[0602] SEQ ID NO.s: 2137, 2231, 2325, 2419, 2513, and 2607;
[0603] SEQ ID NO.s: 2138, 2232, 2326, 2420, 2514, and 2608;
[0604] SEQ ID NO.s: 2139, 2233, 2327, 2421, 2515, and 2609;
[0605] SEQ ID NO.s: 2140, 2234, 2328, 2422, 2516, and 2610;
[0606] SEQ ID NO.s: 2141, 2235, 2329, 2423, 2517, and 2611;
[0607] SEQ ID NO.s: 2142, 2236, 2330, 2424, 2518, and 2612;
[0608] SEQ ID NO.s: 2143, 2237, 2331, 2425, 2519, and 2613;
[0609] SEQ ID NO.s: 2144, 2238, 2332, 2426, 2520, and 2614;
[0610] SEQ ID NO.s: 2145, 2239, 2333, 2427, 2521, and 2615;
[0611] SEQ ID NO.s: 2146, 2240, 2334, 2428, 2522, and 2616;
[0612] SEQ ID NO.s: 2147, 2241, 2335, 2429, 2523, and 2617;
[0613] SEQ ID NO.s: 2148, 2242, 2336, 2430, 2524, and 2618;
[0614] SEQ ID NO.s: 2149, 2243, 2337, 2431, 2525, and 2619;
[0615] SEQ ID NO.s: 2150, 2244, 2338, 2432, 2526, and 2620;
[0616] SEQ ID NO.s: 2151, 2245, 2339, 2433, 2527, and 2621; and
[0617] SEQ ID NO.s: 2152, 2246, 2340, 2434, 2528, and 2622;
[0618] or a combination of HCDR1, HCDR2, HCDR3, LCDR1, LCDR2, and LCDR3 with at least 95% sequence identity to the foregoing.

[0619] Embodiment 164. The polypeptide of Embodiment 162, comprising a V_{H} domain and V_{L} domain, wherein:
[0620] the V_{H} domain comprises an amino acid sequence with at least 95% sequence identity to an amino acid sequence chosen from SEQ ID NOs: 2623-2716; and/or
[0621] the V_{L} domain comprises an amino acid sequence with at least 95% sequence identity to an amino acid sequence chosen from SEQ ID NOs: 2717-2810.

[0622] Embodiment 165. The polypeptide of Embodiment 164, comprising a combination of V_{H} and V_{L} domains chosen from:
[0623] SEQ ID NO.s: 2623 and 2717;
[0624] SEQ ID NO.s: 2624 and 2718;
[0625] SEQ ID NO.s: 2625 and 2719;
[0626] SEQ ID NO.s: 2626 and 2720;
[0627] SEQ ID NO.s: 2627 and 2721;
[0628] SEQ ID NO.s: 2628 and 2722;
[0629] SEQ ID NO.s: 2629 and 2723;
[0630] SEQ ID NO.s: 2630 and 2724;
[0631] SEQ ID NO.s: 2631 and 2725;
[0632] SEQ ID NO.s: 2632 and 2726;
[0633] SEQ ID NO.s: 2633 and 2727;
[0634] SEQ ID NO.s: 2634 and 2728;
[0635] SEQ ID NO.s: 2635 and 2729;
[0636] SEQ ID NO.s: 2636 and 2730;
[0637] SEQ ID NO.s: 2637 and 2731;
[0638] SEQ ID NO.s: 2638 and 2732;
[0639] SEQ ID NO.s: 2639 and 2733;
[0640] SEQ ID NO.s: 2640 and 2734;
[0641] SEQ ID NO.s: 2641 and 2735;
[0642] SEQ ID NO.s: 2642 and 2736;
[0643] SEQ ID NO.s: 2643 and 2737;
[0644] SEQ ID NO.s: 2644 and 2738;
[0645] SEQ ID NO.s: 2645 and 2739;
[0646] SEQ ID NO.s: 2646 and 2740;
[0647] SEQ ID NO.s: 2647 and 2741;
[0648] SEQ ID NO.s: 2648 and 2742;
[0649] SEQ ID NO.s: 2649 and 2743;
[0650] SEQ ID NO.s: 2650 and 2744;
[0651] SEQ ID NO.s: 2651 and 2745;
[0652] SEQ ID NO.s: 2652 and 2746;
[0653] SEQ ID NO.s: 2653 and 2747;
[0654] SEQ ID NO.s: 2654 and 2748;
[0655] SEQ ID NO.s: 2655 and 2749;
[0656] SEQ ID NO.s: 2656 and 2750;
[0657] SEQ ID NO.s: 2657 and 2751;
[0658] SEQ ID NO.s: 2658 and 2752;
[0659] SEQ ID NO.s: 2659 and 2753;
[0660] SEQ ID NO.s: 2660 and 2754;
[0661] SEQ ID NO.s: 2661 and 2755;
[0662] SEQ ID NO.s: 2662 and 2756;
[0663] SEQ ID NO.s: 2663 and 2757;
[0664] SEQ ID NO.s: 2664 and 2758;
[0665] SEQ ID NO.s: 2665 and 2759;
[0666] SEQ ID NO.s: 2666 and 2760;
[0667] SEQ ID NO.s: 2667 and 2761;
[0668] SEQ ID NO.s: 2668 and 2762;
[0669] SEQ ID NO.s: 2669 and 2763;
[0670] SEQ ID NO.s: 2670 and 2764;
[0671] SEQ ID NO.s: 2671 and 2765;
[0672] SEQ ID NO.s: 2672 and 2766;
[0673] SEQ ID NO.s: 2673 and 2767;
[0674] SEQ ID NO.s: 2674 and 2768;
[0675] SEQ ID NO.s: 2675 and 2769;
[0676] SEQ ID NO.s: 2676 and 2770;
[0677] SEQ ID NO.s: 2677 and 2771;
[0678] SEQ ID NO.s: 2678 and 2772;
[0679] SEQ ID NO.s: 2679 and 2773;
[0680] SEQ ID NO.s: 2680 and 2774;
[0681] SEQ ID NO.s: 2681 and 2775;
[0682] SEQ ID NO.s: 2682 and 2776;
[0683] SEQ ID NO.s: 2683 and 2777;
[0684] SEQ ID NO.s: 2684 and 2778;
[0685] SEQ ID NO.s: 2685 and 2779;
[0686] SEQ ID NO.s: 2686 and 2780;
[0687] SEQ ID NO.s: 2687 and 2781;
[0688] SEQ ID NO.s: 2688 and 2782;
[0689] SEQ ID NO.s: 2689 and 2783;
[0690] SEQ ID NO.s: 2690 and 2784;
[0691] SEQ ID NO.s: 2691 and 2785;
[0692] SEQ ID NO.s: 2692 and 2786;
[0693] SEQ ID NO.s: 2693 and 2787;
[0694] SEQ ID NO.s: 2694 and 2788;
[0695] SEQ ID NO.s: 2695 and 2789;
[0696] SEQ ID NO.s: 2696 and 2790;
[0697] SEQ ID NO.s: 2697 and 2791;
[0698] SEQ ID NO.s: 2698 and 2792;
[0699] SEQ ID NO.s: 2699 and 2793;
[0700] SEQ ID NO.s: 2700 and 2794;
[0701] SEQ ID NO.s: 2701 and 2795;
[0702] SEQ ID NO.s: 2702 and 2796;
[0703] SEQ ID NO.s: 2703 and 2797;
[0704] SEQ ID NO.s: 2704 and 2798;
[0705] SEQ ID NO.s: 2705 and 2799;
[0706] SEQ ID NO.s: 2706 and 2800;
[0707] SEQ ID NO.s: 2707 and 2801;
[0708] SEQ ID NO.s: 2708 and 2802;
[0709] SEQ ID NO.s: 2709 and 2803;
[0710] SEQ ID NO.s: 2710 and 2804;
[0711] SEQ ID NO.s: 2711 and 2805;
[0712] SEQ ID NO.s: 2712 and 2806;
[0713] SEQ ID NO.s: 2713 and 2807;
[0714] SEQ ID NO.s: 2714 and 2808;
[0715] SEQ ID NO.s: 2715 and 2809; and
[0716] SEQ ID NO.s: 2716 and 2810;
[0717] or a combination of V_{H} and V_{L} domains with at least 95% sequence identity to the foregoing.

[0718] Embodiment 165. The polypeptide of any of Embodiments 154-164, wherein
[0719] the HCDR1, HCDR2, and HCDR3 and/or the LCDR1, LCDR2, and LCDR3, or
[0720] the V_{H} and/or V_{L} domains,
   have at least 97%, 98% or 99% sequence identity to the recited amino acid sequences.

[0721] Embodiment 166. A single-chain variable fragment (scFv) comprising the polypeptide of any of Embodiments 154-164.

[0722] Embodiment 167. A monoclonal antibody (mAb), or an antigen-binding fragment thereof, comprising the polypeptide of any of Embodiments 154-164.

[0723] Embodiment 168. The mAb, or antigen-binding fragment thereof, of Embodiment 167, wherein the mAb is of the IgG, IgM, or IgA isotype.

[0724] Embodiment 169. The mAb, or antigen-binding fragment thereof, of Embodiment 170, wherein the mAb is of the IgG1 isotype.

[0725] Embodiment 170. The mAb, or antigen-binding fragment thereof, of Embodiment 170, wherein the mAb is of the IgG3 isotype.

[0726] Embodiment 171. The mAb, or antigen-binding fragment thereof, of Embodiment 170, wherein the mAb is of the IgG4 isotype.

[0727] Embodiment 172. The mAb, or antigen-binding fragment thereof, of Embodiment 170, wherein the mAb is human or humanized.

[0728] Embodiment 173. An antibody-drug conjugate (ADC) comprising the mAb, or antigen-binding fragment thereof, of any of Embodiments 167-172.

[0729] Embodiment 174. The ADC of Embodiment 173, having Formula I:

Ab-(L-D)ₚ (I)

wherein:
[0730] Ab is an antibody comprising the polypeptide of any of Embodiments 1-43, or the antibody of any of Embodiments 45-51, or an antigen-binding fragment of either of the foregoing;
[0731] L is a linker;
[0732] D is a drug; and
[0733] p is about 1 to about 20.

[0734] Embodiment 175. The ADC of Embodiment 174, wherein D is chosen from saporin, MMAE, MMAF, DM1, and DM4.

[0735] Embodiment 176. A chimeric antigen receptor (CAR) comprising an extracellular ligand binding domain comprising a polypeptide of any one of Embodiments 1-69.

[0736] Embodiment 177. The CAR of Embodiment 176, additionally comprising:
[0737] a hinge domain;
[0738] a transmembrane domain;
[0739] optionally, one or more co-stimulatory domains; and
[0740] a cytoplasmic signaling domain.

[0741] Embodiment 178. The CAR of Embodiment 177, wherein the hinge domain is chosen from FcεRIIIa, CD8α, CD28 and IgG1.

[0742] Embodiment 179. The CAR of Embodiment 178, wherein the hinge domain is CD8α.

[0743] Embodiment 180. The CAR of any of Embodiments 177-179, wherein the transmembrane domain is chosen from alpha, beta or zeta chain of the T-cell receptor, CD28, CD3 epsilon, CD45, CD4, CD5, CD9, CD16, CD22, CD33, CD37, CD64, CDS0, CD86, CD134, CD137 and CD154.

[0744] Embodiment 181. The CAR of Embodiment 180, wherein the transmembrane domain is CD28.

[0745] Embodiment 182. The CAR of any of Embodiments 177-181, wherein the cytoplasmic signaling domain is chosen from CD8, CD3ζ, CD3δ, CD3γ, CD3δ, CD22, CD32, DAP10, DAP12, CD66d, CD79a, CD79b, FcγRIγ, FcγRIIIγ, FcεRIβ, FcεRIγ, FcRγ, FcRβ, and FcRε.

[0746] Embodiment 183. The CAR of Embodiment 182, wherein the cytoplasmic signaling domain is CD3ζ.

[0747] Embodiment 184. The CAR of any of Embodiments 177-183, wherein one co-stimulatory domain is chosen from 4-1BB, CD28, and ICOS.

[0748] Embodiment 185. The CAR of Embodiment 184, wherein the costimulatory domain is CD28.

[0749] Embodiment 186. The CAR of Embodiment 184, wherein the costimulatory domain is 4-1BB.

[0750] Embodiment 187. The CAR of Embodiment 184, comprising two or more costimulatory domains.

[0751] Embodiment 188. The CAR of Embodiment 184, wherein two of the costimulatory domains are CD28 and 4-1BB.

[0752] Embodiment 189. A nucleotide sequence encoding any of the polypeptides, scFvs, mAbs, or CARs of any of Embodiments 154-188.

[0753] Embodiment 190. A vector comprising the nucleotide sequence of Embodiment 189.

[0754] Embodiment 191. The vector of Embodiment 190, wherein the vector is a lentiviral vector.

[0755] Embodiment 192. The vector of Embodiment 191, wherein the lentiviral vector comprises a VSVG domain.

[0756] Embodiment 193. An engineered immune effector cell expressing at the cell surface a CAR of any one of Embodiment 176-188.

[0757] Embodiment 194. The engineered immune effector cell of Embodiment 193, wherein the engineered immune effector cell expresses at the cell surface:
[0758] a first polymorphic variant of a human cancer cell antigen; and
[0759] a CAR that is selective for a second polymorphic over the first polymorphic variant of the antigen.

[0760] Embodiment 195. The engineered immune effector cell of Embodiment 193, wherein the cell is a primary cell.

[0761] Embodiment 196. The engineered immune effector cell of Embodiment 193, wherein the cell is derived from:
[0762] an induced pluripotent stem cell (iPSC);
[0763] cord blood;
[0764] peripheral blood; or
[0765] an immortalized cell line.

[0766] Embodiment 197. The engineered immune effector cell of Embodiment 196, wherein the immortalized cell line is NK-92.

[0767] Embodiment 198. The engineered immune cell of any of Embodiments 193-197, wherein the cell is chosen from a T cell, an natural killer (NK) cell, an invariant natural killer T (iNKT) cell, a macrophage, and a dendritic cell.

[0768] Embodiment 199. The engineered immune effector cell of Embodiment 198, wherein the cell is a T cell.

[0769] Embodiment 200. The engineered immune effector cell of Embodiment 199, wherein the T cell is chosen from an inflammatory T-lymphocyte, a cytotoxic T-lymphocyte, a regulatory T-lymphocyte, or a helper T-lymphocyte.

[0770] Embodiment 201. The engineered immune effector cell of Embodiment 199, wherein the engineered immune effector cell is deficient in a subunit of the T cell receptor complex.

[0771] Embodiment 202. The engineered immune effector cell of Embodiment 201, wherein the subunit of the T cell receptor complex is chosen from TCRα(TRAC), TCRβ, TCRδ, TCRγ, CD3ε, CD3γ, CD3δ, and CD3ζ.

[0772] Embodiment 203. The engineered immune effector cell of any of Embodiments 193-202, wherein the engineered immune effector cell is deficient in a cell surface protein that is the target of the CAR.

[0773] Embodiment 204. The engineered immune effector cell of Embodiment 198, wherein the engineered immune effector cell is an NK cell.

[0774] Embodiment 205. The engineered immune effector cell of Embodiment 204 wherein the engineered immune effector cell is a memory-like (ML) NK cell.

[0775] Embodiment 206. The engineered immune effector cell of Embodiment 205, wherein the engineered immune effector cell is a cytokine-induced memory-like (CIML) NK cell.

[0776] Embodiment 207. The engineered immune effector cell of Embodiment 198, wherein the engineered immune effector cell is an iNKT cell.

[0777] Embodiment 208. A method for treatment of cancer in a patient comprising administering to a cancer patient, a therapeutically effective amount of: a monoclonal antibody (mAb), or an antigen-binding fragment thereof, of any of Embodiments 167-170; an antibody-drug conjugate (ADC) of any of Embodiments 173-175; or an engineered immune effector cell of any of Embodiments 193-207.

[0778] Embodiment 209. The method of Embodiment 208, wherein the cancer is a hematologic malignancy.

[0779] Embodiment 210. The method of Embodiment 209, wherein the hematologic malignancy is multiple myeloma.

[0780] Embodiment 211. The method of Embodiment 210, wherein the hematologic malignancy is acute myeloid leukemia (AML).

### Polypeptides

[0781] Disclosed herein are polypeptides, such as monoclonal antibodies (mAbs) and functional fragments thereof, synthetic antigen-binding proteins such as single-chain variable fragments (scFvs), and chimeric antigen receptors (CARs), that can specifically recognize tumor-associated antigens (TAAs) on cancer cells, for example those that express CD33, FLT3, and CLL-1. In some embodiments, the mAbs, scFvs, or CARs recognize polymorphic variants of CD33, FLT3, and CLL-1 expressed on cancer cells; in some embodiments, they are selective for one polymorphic variant over other polymorphic variants. Also disclosed are immune effector cells, such as T cells, natural killer (NK) cells, and invariant natural killer T (iNKT) cells that are engineered to express CARs that specifically recognize the tumor-associated antigens (TAAs) CD33, FLT3, and CLL-1 or polymorphic variants of CD33, FLT3, and CLL-1. Also disclosed are methods for providing an anti-tumor immunity in a subject with CD33, FLT3, and CLL-1-expressing cancers using the disclosed monoclonal antibodies and immune effector cells which express CARs.

[0782] Antibodies that can be used in the disclosed compositions and methods include whole immunoglobulin (i.e., an intact antibody) of any class, fragments thereof, and, using the term more loosely, synthetic proteins containing at least the antigen binding variable domain of an antibody (e.g., single-chain variable fragments, scFvs). The variable domains differ in sequence among antibodies and are used in the binding and specificity of each particular antibody for its particular antigen. However, the variability is not usually evenly distributed through the variable domains of antibodies. It is typically concentrated in three segments called complementarity determining regions (CDRs) or hypervariable regions both in the light chain and the heavy chain variable domains. The more highly conserved portions of the variable domains are called the framework (FR). The variable domains of native heavy and light chains each comprise four FR regions, largely adopting a beta-sheet configuration, connected by three CDRs, which form loops connecting, and in some cases forming part of, the beta-sheet structure. The CDRs in each chain are held together in close proximity by the FR regions and, with the CDRs from the other chain, contribute to the formation of the antigen binding site of antibodies.

[0783] Transgenic animals (e.g., mice) that are capable, upon immunization, of producing a full repertoire of human antibodies in the absence of endogenous immunoglobulin production can be employed. For example, it has been described that the homozygous deletion of the antibody heavy chain joining region (J(H)) gene in chimeric and germ-line mutant mice results in complete inhibition of endogenous antibody production. Transfer of the human germ-line immunoglobulin gene array in such germ-line mutant mice will result in the production of human antibodies upon antigen challenge. Human antibodies can also be produced in phage display libraries. The techniques of Cote et al. and Boerner et al. are also available for the preparation of human monoclonal antibodies.

[0784] Optionally, the antibodies are generated in other species and “humanized” for administration in humans. Humanized forms of non-human (e.g., murine) antibodies are chimeric immunoglobulins, immunoglobulin chains or fragments thereof (such as Fv, Fab, Fab′, F(ab′)2, or other antigen-binding subsequences of antibodies) which contain minimal sequence derived from non-human immunoglobulin. Humanized antibodies include human immunoglobulins (recipient antibody) in which residues from a complementarity determining region (CDR) of the recipient antibody are replaced by residues from a CDR of a non-human species (donor antibody) such as mouse, rat or rabbit having the desired specificity, affinity and capacity. In some instances, Fv framework residues of the human immunoglobulin are replaced by corresponding non-human residues. Humanized antibodies may also comprise residues that are found neither in the recipient antibody nor in the imported CDR or framework sequences. In general, the humanized antibody will comprise substantially all of at least one, and typically two, variable domains, in which all or substantially all of the CDR regions correspond to those of a non-human immunoglobulin and all or substantially all of the FR regions are those of a human immunoglobulin consensus sequence. The humanized antibody optimally also will comprise at least a portion of an immunoglobulin constant region (Fc), typically that of a human immunoglobulin.

[0785] Methods for humanizing non-human antibodies are well known in the art. Generally, a humanized antibody has one or more amino acid residues introduced into it from a source that is non-human. These non-human amino acid residues are often referred to as “import” residues, which are typically taken from an “import” variable domain. Antibody humanization techniques generally involve the use of recombinant DNA technology to manipulate the DNA sequence encoding one or more polypeptide chains of an antibody molecule. Humanization can be essentially performed following the method of Winter and co-workers (Jones et al., Nature, 321:522-525 (1986); Riechmann et al., Nature, 332:323-327 (1988); Verhoeyen et al., Science, 239:1534-1536 (1988)), by substituting rodent CDRs or CDR sequences for the corresponding sequences of a human antibody. Accordingly, a humanized form of a non-human antibody (or an antigen-binding fragment thereof) is a chimeric antibody or fragment (U.S. Pat. No. 4,816,567), wherein substantially less than an intact human variable domain has been substituted by the corresponding sequence from a non-human species. In practice, humanized antibodies are typically human antibodies in which some CDR residues and possibly some FR residues are substituted by residues from analogous sites in rodent antibodies.

[0786] The embodiments of the disclosure include polypeptides, specifically monoclonal antibodies (mAbs), antigen-binding fragments thereof, synthetic antigen-binding proteins such as scFvs, and chimeric antigen receptors (CARs), which are defined by reference to structural characteristics, i.e., specific amino acid sequences of either the Complementarity-Determining Regions (CDRs), heavy chain or light chain variable domains (V_{H} or V_{L}), or full length heavy or light chains (HC or LC). The monoclonal antibodies or antigen binding fragments thereof of the disclosure bind to, e.g., CD33, FLT3, or CLL-1 or polymorphic variants thereof.

[0787] Also disclosed are fragments of antibodies which have bioactivity. The fragments, whether attached to other sequences or not, include insertions, deletions, substitutions, or other selected modifications of particular regions or specific amino acids residues, provided the activity of the fragment is not significantly altered or impaired compared to the non-modified antibody or antibody fragment.

[0788] Techniques can also be adapted for the production of synthetic single-chain antibodies (actually antibody-like fusion proteins) specific to an antigenic protein of the present disclosure. Methods for the production of single-chain antibodies are well known to those of skill in the art. A single-chain antibody can be created by fusing together the variable domains of the heavy and light chains using a short peptide linker, thereby reconstituting an antigen binding site on a single molecule. Single-chain antibody variable fragments (scFvs) in which the C-terminus of one variable domain is tethered to the N-terminus of the other variable domain via a 15 to 25 amino acid peptide or linker have been developed without significantly disrupting antigen binding or specificity of the binding. The linker is chosen to permit the heavy chain and light chain to bind together in their proper conformational orientation.

[0789] The monoclonal antibodies or antigen binding fragments thereof of the disclosure, comprise at least one, usually at least three CDR sequences, in combination with framework sequences from a human variable region or as an isolated CDR peptide. In some embodiments, an antibody comprises at least one heavy chain comprising three heavy chain CDR sequences situated in a variable region framework, which may be a human or murine variable region framework, and at least one light chain comprising the three light chain CDR sequences provided herein situated in a variable region framework, which may be a murine or human variable region framework.

### Anti-CD33 Polypeptides

[0790] In some embodiments of the disclosure are provided anti-CD33 polypeptides, including mAbs, antigen binding fragments thereof, and synthetic fusion proteins such as single-chain variable fragments (scFvs), comprising one or more complementarity-determining regions (CDRs) which recognize and bind CD33. In some embodiments, the anti-CD33 polypeptides, including mAbs, antigen binding fragments thereof, and synthetic fusion proteins such as single-chain variable fragments (scFvs) selectively bind a first polymorphic variant of CD33 over a second polymorphic variant of CD33; or selectively binds the second polymorphic variant of CD33 over the first polymorphic variant. In some embodiments, the binding is at least 2-fold, 10-fold, or 30-fold selective.

[0791] In some embodiments, the first polymorphic variant of CD33 is R69 and the second polymorphic variant of CD33 is G69; or first polymorphic variant of CD33 is G69 and the second polymorphic variant of CD33 is R69.

[0792] In some embodiments of the disclosure are provided anti-CD33 polypeptides, including mAbs, antigen binding fragments thereof, and synthetic fusion proteins such as single-chain variable fragments (scFvs), comprising one or more complementarity-determining regions (CDRs) which recognize and bind CD33. Sequences of the CDRs and V_{H} and V_{L} domains for the anti-CD33 polypeptides described herein for binding CD33 are provided in Tables and Examples below.

[0793] Provided herein therefore, are a heavy chain variable (V_{H}) domain CDR1 (HCDR1), a V_{H} domain CDR2 (HCDR2), and a V_{H} domain CDR3 (HCDR3), and polypeptides comprising them, wherein the HCDR1 comprises an amino acid sequence chosen from any of SEQ ID NOs 1-25 and 201-217; HCDR2 comprises an amino acid sequence chosen from any of SEQ ID NOs 26-50 and 218-234; and HCDR3 comprises an amino acid sequence chosen from any of SEQ ID NOs 51-75 and 235-251. Also provided are a HCDR1, a HCDR2, and a HCDR3, and polypeptides comprising them, wherein the HCDR1 comprises an amino acid sequence chosen from any of SEQ ID NOs 1-25; HCDR2 comprises an amino acid sequence chosen from any of SEQ ID NOs 26-50; and HCDR3 comprises an amino acid sequence chosen from any of SEQ ID NOs 51-75. Also provided are HCDR1, a HCDR2, and a HCDR3, and polypeptides comprising them, wherein the HCDR1 comprises an amino acid sequence chosen from any of SEQ ID NOs 201-217; HCDR2 comprises an amino acid sequence chosen from any of SEQ ID NOs 218-234; and HCDR3 comprises an amino acid sequence chosen from any of SEQ ID NOs 235-251.

[0794] Also provided is a V_{H} domain comprising one or more of these CDRs. The V_{H} domain of the anti-CD33 mAb or antigen binding fragment thereof may comprise any one of the listed HCDR1 sequences in combination with any one of the HCDR2 sequences, and in combination with any one of the HCDR3 sequences. However, in certain embodiments, the provided HCDR1, HCDR2, and HCDR3 sequences are derived from a single common V_{H} domain, the examples of which are described herein.

[0795] The anti-CD33 mAbs, antigen binding fragments thereof, and synthetic antigen-binding proteins such as scFvs may additionally comprise a light chain variable (V_{L}) domain, which is paired with the V_{H} domain to form an CD33 antigen binding domain.

[0796] Provided herein therefore, are a light chain variable (V_{L}) domain CDR1 (LCDR1), a V_{L} domain CDR2 (LCDR2), and a V_{L} domain CDR3 (LCDR3), and polypeptides comprising them, wherein the LCDR1 comprises an amino acid sequence chosen from: SEQ ID NOs 76-100 and 252-268; LCDR2 comprises an amino acid sequence chosen from: SEQ ID NOs 101-125 and 269-285; and LCDR3 comprises an amino acid sequence chosen from: SEQ ID NOs 126-150 and 286-302. Also provided are a LCDR1, a LCDR2, and a LCDR3, and polypeptides comprising them, wherein the LCDR1 comprises an amino acid sequence chosen from any of SEQ ID NOs 76-100; LCDR2 comprises an amino acid sequence chosen from any of SEQ ID NOs 101-125; and LCDR3 comprises an amino acid sequence chosen from any of SEQ ID NOs 125-150. Also provided are a LCDR1, a LCDR2, and a LCDR3, and polypeptides comprising them, wherein the LCDR1 comprises an amino acid sequence chosen from any of SEQ ID NOs 252-268; LCDR2 comprises an amino acid sequence chosen from any of SEQ ID NOs 269-285; and LCDR3 comprises an amino acid sequence chosen from any of SEQ ID NOs 286-302.

[0797] Also provided is a V_{L} domain comprising one or more of these CDRs. The V_{L} domain of the anti-CD33 mAb, antigen binding fragment thereof, or synthetic antigen-binding protein such as an scFv may comprise any one of the listed LCDR1 sequences in combination with any one of the LCDR2 sequences, and in combination with any one of the LCDR3 sequences. However, in certain embodiments, the LCDR1, LCDR2, and LCDR3 sequences are derived from a single common V_{L} domain, examples of which are described herein.

[0798] Also provided are mAbs, antigen binding fragments thereof, and synthetic antigen-binding proteins such as scFvs comprising the CDRs, V_{H} domains, and/or V_{L} domain disclosed herein. Any given anti-CD33 mAb (and certain antigen-binding fragments thereof) or scFv comprising a V_{H} domain paired with a V_{L} domain will comprise a combination of six (6) CDRs: a V_{H} domain CDR1 (HCDR1), a V_{H} domain CDR2 (HCDR2), and a V_{H} domain CDR3 (HCDR3), a V_{L} domain CDR1 (LCDR1), a V_{L} domain CDR2 (LCDR2), and a V_{L} domain CDR3 (LCDR3). Although all combinations of six (6) CDRs chosen from the CDR amino acid sequences described above are permissible and within the scope of the disclosure, certain combinations of the six (6) CDRs are provided herein.

[0799] In some embodiments, the combination of the six (6) CDRs is chosen from the combinations recited in each of Polypeptide No.s 1-42. In some embodiments, the combination of the six (6) CDRs is chosen from the combinations recited in each of Polypeptide No.s 1-25. In some embodiments, the combination of the six (6) CDRs is chosen from the combinations recited in each of Polypeptide No.s 26-42.

[0800] In some embodiments, the anti-CD33 mAbs, antigen binding fragments thereof, and synthetic antigen-binding proteins such as scFvs comprise a V_{H} domain chosen from any of SEQ ID NOs 151-175 and 303-319, with amino acid sequences exhibiting at least 90% sequence identity, or at least 95%, 96% 97%, 98% or 99% sequence identity to one of the recited amino acid sequences. In some embodiments, the anti-CD33 mAbs, antigen binding fragments thereof, and synthetic antigen-binding proteins such as scFvs comprise a V_{H} domain chosen from any of SEQ ID NOs 151-175, with amino acid sequences exhibiting at least 90% sequence identity, or at least 95%, 96% 97%, 98% or 99% sequence identity to one of the recited amino acid sequences. In some embodiments, the anti-CD33 mAbs, antigen binding fragments thereof, and synthetic antigen-binding proteins such as scFvs comprise a V_{H} domain chosen from any of SEQ ID NOs 303-319, with amino acid sequences exhibiting at least 90% sequence identity, or at least 95%, 96% 97%, 98% or 99% sequence identity to one of the recited amino acid sequences.

[0801] Alternatively, or in addition, the anti-CD33 mAbs, antigen binding fragments thereof, and synthetic antigen-binding proteins such as scFvs comprise a V_{L} domain having an amino acid sequence chosen from any of SEQ ID NOs 176-200 and 320-336, and amino acid sequences exhibiting at least 90% sequence identity, or at least 95%, 96% 97%, 98% or 99% sequence identity to one of the recited amino acid sequences. In some embodiments, the anti-CD33 mAbs, antigen binding fragments thereof, and synthetic antigen-binding proteins such as scFvs comprise a V_{L} domain having an amino acid sequence chosen from any of SEQ ID NOs 176-200, and amino acid sequences exhibiting at least 90% sequence identity, or at least 95%, 96% 97%, 98% or 99% sequence identity to one of the recited amino acid sequences. In some embodiments, the anti-CD33 mAbs, antigen binding fragments thereof, and synthetic antigen-binding proteins such as scFvs comprise a V_{L} domain having an amino acid sequence chosen from any of SEQ ID NOs 320-336, and amino acid sequences exhibiting at least 90% sequence identity, or at least 95%, 96% 97%, 98% or 99% sequence identity to one of the recited amino acid sequences.

[0802] Although all possible pairing of V_{H} domains and V_{L} domains chosen from the V_{H} and V_{L} domain amino acid sequences listed above are permissible and within the scope of the disclosure, some embodiments provide certain combinations of V_{H} and V_{L} domains. Accordingly, in some embodiments, anti-CD33 mAbs, antigen binding fragments thereof, and synthetic antigen-binding proteins such as scFvs comprise a combination of a V_{H} domain and a V_{L} domain, wherein the combination is chosen from those recited in Polypeptide No.s 1-42, e.g.:
[0803] SEQ ID NO: 151 and SEQ ID NO: 176;
[0804] SEQ ID NO: 152 and SEQ ID NO: 177;
[0805] SEQ ID NO: 153 and SEQ ID NO: 178;
[0806] SEQ ID NO: 154 and SEQ ID NO: 179;
[0807] SEQ ID NO: 155 and SEQ ID NO: 180;
[0808] SEQ ID NO: 156 and SEQ ID NO: 181;
[0809] SEQ ID NO: 157 and SEQ ID NO: 182;
[0810] SEQ ID NO: 158 and SEQ ID NO: 183;
[0811] SEQ ID NO: 159 and SEQ ID NO: 184;
[0812] SEQ ID NO: 160 and SEQ ID NO: 185;
[0813] SEQ ID NO: 161 and SEQ ID NO: 186;
[0814] SEQ ID NO: 162 and SEQ ID NO: 187;
[0815] SEQ ID NO: 163 and SEQ ID NO: 188;
[0816] SEQ ID NO: 164 and SEQ ID NO: 189;
[0817] SEQ ID NO: 165 and SEQ ID NO: 190;
[0818] SEQ ID NO: 166 and SEQ ID NO: 191;
[0819] SEQ ID NO: 167 and SEQ ID NO: 192;
[0820] SEQ ID NO: 168 and SEQ ID NO: 193;
[0821] SEQ ID NO: 169 and SEQ ID NO: 194;
[0822] SEQ ID NO: 170 and SEQ ID NO: 195;
[0823] SEQ ID NO: 171 and SEQ ID NO: 196;
[0824] SEQ ID NO: 172 and SEQ ID NO: 197;
[0825] SEQ ID NO: 173 and SEQ ID NO: 198;
[0826] SEQ ID NO: 174 and SEQ ID NO: 199;
[0827] SEQ ID NO: 175 and SEQ ID NO: 200;
[0828] SEQ ID NO: 303 and SEQ ID NO: 320;
[0829] SEQ ID NO: 304 and SEQ ID NO: 321;
[0830] SEQ ID NO: 305 and SEQ ID NO: 322;
[0831] SEQ ID NO: 306 and SEQ ID NO: 323;
[0832] SEQ ID NO: 307 and SEQ ID NO: 324;
[0833] SEQ ID NO: 308 and SEQ ID NO: 325;
[0834] SEQ ID NO: 309 and SEQ ID NO: 326;
[0835] SEQ ID NO: 310 and SEQ ID NO: 327;
[0836] SEQ ID NO: 311 and SEQ ID NO: 328;
[0837] SEQ ID NO: 312 and SEQ ID NO: 329;
[0838] SEQ ID NO: 313 and SEQ ID NO: 330;
[0839] SEQ ID NO: 314 and SEQ ID NO: 331;
[0840] SEQ ID NO: 315 and SEQ ID NO: 332;
[0841] SEQ ID NO: 316 and SEQ ID NO: 333;
[0842] SEQ ID NO: 317 and SEQ ID NO: 334;
[0843] SEQ ID NO: 318 and SEQ ID NO: 335;
[0844] and
[0845] SEQ ID NO: 319 and SEQ ID NO: 336.

[0846] In some embodiments, anti-CD33 mAbs, antigen binding fragments thereof, and synthetic antigen-binding proteins such as scFvs comprise a combination of a V_{H} domain and a V_{L} domain, wherein the combination is chosen from those recited in Polypeptide No.s 1-25, e.g.:
[0847] SEQ ID NO: 151 and SEQ ID NO: 176;
[0848] SEQ ID NO: 152 and SEQ ID NO: 177;
[0849] SEQ ID NO: 153 and SEQ ID NO: 178;
[0850] SEQ ID NO: 154 and SEQ ID NO: 179;
[0851] SEQ ID NO: 155 and SEQ ID NO: 180;
[0852] SEQ ID NO: 156 and SEQ ID NO: 181;
[0853] SEQ ID NO: 157 and SEQ ID NO: 182;
[0854] SEQ ID NO: 158 and SEQ ID NO: 183;
[0855] SEQ ID NO: 159 and SEQ ID NO: 184;
[0856] SEQ ID NO: 160 and SEQ ID NO: 185;
[0857] SEQ ID NO: 161 and SEQ ID NO: 186;
[0858] SEQ ID NO: 162 and SEQ ID NO: 187;
[0859] SEQ ID NO: 163 and SEQ ID NO: 188;
[0860] SEQ ID NO: 164 and SEQ ID NO: 189;
[0861] SEQ ID NO: 165 and SEQ ID NO: 190;
[0862] SEQ ID NO: 166 and SEQ ID NO: 191;
[0863] SEQ ID NO: 167 and SEQ ID NO: 192;
[0864] SEQ ID NO: 168 and SEQ ID NO: 193;
[0865] SEQ ID NO: 169 and SEQ ID NO: 194;
[0866] SEQ ID NO: 170 and SEQ ID NO: 195;
[0867] SEQ ID NO: 171 and SEQ ID NO: 196;
[0868] SEQ ID NO: 172 and SEQ ID NO: 197;
[0869] SEQ ID NO: 173 and SEQ ID NO: 198;
[0870] SEQ ID NO: 174 and SEQ ID NO: 199;
[0871] and
[0872] SEQ ID NO: 175 and SEQ ID NO: 200.

[0873] In some embodiments, anti-CD33 mAbs, antigen binding fragments thereof, and synthetic antigen-binding proteins such as scFvs comprise a combination of a V_{H} domain and a V_{L} domain, wherein the combination is chosen from those recited in Polypeptide No.s 26-42, e.g.:
[0874] SEQ ID NO: 303 and SEQ ID NO: 320;
[0875] SEQ ID NO: 304 and SEQ ID NO: 321;
[0876] SEQ ID NO: 305 and SEQ ID NO: 322;
[0877] SEQ ID NO: 306 and SEQ ID NO: 323;
[0878] SEQ ID NO: 307 and SEQ ID NO: 324;
[0879] SEQ ID NO: 308 and SEQ ID NO: 325;
[0880] SEQ ID NO: 309 and SEQ ID NO: 326;
[0881] SEQ ID NO: 310 and SEQ ID NO: 327;
[0882] SEQ ID NO: 311 and SEQ ID NO: 328;
[0883] SEQ ID NO: 312 and SEQ ID NO: 329;
[0884] SEQ ID NO: 313 and SEQ ID NO: 330;
[0885] SEQ ID NO: 314 and SEQ ID NO: 331;
[0886] SEQ ID NO: 315 and SEQ ID NO: 332;
[0887] SEQ ID NO: 316 and SEQ ID NO: 333;
[0888] SEQ ID NO: 317 and SEQ ID NO: 334;
[0889] SEQ ID NO: 318 and SEQ ID NO: 335;
[0890] and
[0891] SEQ ID NO: 319 and SEQ ID NO: 336.

[0892] In some embodiments, anti-CD33 antibodies, antigen binding fragments thereof, and synthetic antigen-binding proteins such as scFvs may also comprise a combination of a variable heavy chain domain and a variable light chain domain wherein the variable heavy chain domain comprises a V_{H} sequence with at least 90% sequence identity, or at least 95%, 96% 97%, 98% or 99% sequence identity, to the variable heavy chain amino acid sequences shown above and/or wherein the variable light chain domain comprises a V_{L} sequence with at least 90% sequence identity, or at least 95%, 96% 97%, 98% or 99% sequence identity, to the variable light chain domain amino acid sequences shown above. The specific V_{H} and V_{L} pairings or combinations above may be preserved for anti-CD33 antibodies, antigen binding fragments thereof, and synthetic antigen-binding proteins such as scFvs having V_{H} and V_{L} domain sequences with a particular amino acid sequence percent identity to these reference sequences disclosed herein.

[0893] For all embodiments wherein the variable heavy chain and/or light chain domains of the antibodies, antigen binding fragments thereof, and synthetic antigen-binding proteins such as scFvs are defined by a particular amino acid sequence percent identity to a reference sequence, the V_{H} and/or V_{L} domains may retain identical CDR sequences to those present in the reference sequence such that the variation is present only within the framework regions.

### Anti-FLT3 Polypeptides

[0894] In some embodiments of the disclosure are provided anti-FLT3 polypeptides, including mAbs, antigen binding fragments thereof, and synthetic fusion proteins such as single-chain variable fragments (scFvs), comprising one or more complementarity-determining regions (CDRs) which recognize and bind FLT3. In some embodiments, the anti-FLT3 polypeptides, including mAbs, antigen binding fragments thereof, and synthetic fusion proteins such as single-chain variable fragments (scFvs) selectively bind a first polymorphic variant of FLT3 over a second polymorphic variant of FLT3; or selectively binds the second polymorphic variant of FLT3 over the first polymorphic variant. In some embodiments, the binding is at least 2-fold, 10-fold, or 30-fold selective.

[0895] In some embodiments, the first polymorphic variant of FLT3 is T227 and the second polymorphic variant of FLT3 is M227; or first polymorphic variant of FLT3 is M227 and the second polymorphic variant of FLT3 is T227.

[0896] Provided herein therefore, are a heavy chain variable (V_{H}) domain CDR1 (HCDR1), a V_{H} domain CDR2 (HCDR2), and a V_{H} domain CDR3 (HCDR3), and polypeptides comprising them.

[0897] Also provided is a V_{H} domain comprising one or more of these CDRs. The V_{H} domain of the anti-FLT3 mAb, antigen binding fragment thereof, or synthetic antigen-binding protein such as an scFv may comprise any one of the listed HCDR1 sequences in combination with any one of the HCDR2 sequences, and in combination with any one of the HCDR3 sequences. However, in certain embodiments, the provided HCDR1, HCDR2, and HCDR3 sequences are derived from a single common V_{H} domain, the examples of which are described herein.

[0898] The anti-FLT3 mAbs, antigen binding fragments thereof, and synthetic antigen-binding proteins such as scFvs may additionally comprise a light chain variable (V_{L}) domain, which is paired with the V_{H} domain to form an FLT3 antigen binding domain.

[0899] Provided herein therefore, are a light chain variable (V_{L}) domain CDR1 (LCDR1), a V_{L} domain CDR2 (LCDR2), and a V_{L} domain CDR3 (LCDR3), and polypeptides comprising them

[0900] Also provided is a V_{L} domain comprising one or more of these CDRs. The V_{L} domain of the anti-FLT3 mAb, antigen binding fragments thereof, or synthetic antigen-binding protein such as an scFv may comprise any one of the listed LCDR1 sequences in combination with any one of the LCDR2 sequences, and in combination with any one of the LCDR3 sequences. However, in certain embodiments, the LCDR1, LCDR2, and LCDR3 sequences are derived from a single common V_{L} domain, examples of which are described herein.

[0901] Also provided are mAbs, antigen binding fragments thereof, and synthetic antigen-binding proteins such as scFvs comprising the CDRs, V_{H} domains, and/or V_{L} domain disclosed herein. Any given anti-FLT3 mAb (and certain antigen-binding fragments thereof or scFv comprising a V_{H} domain paired with a V_{L} domain will comprise a combination of six (6) CDRs: a V_{H} domain CDR1 (HCDR1), a V_{H} domain CDR2 (HCDR2), and a V_{H} domain CDR3 (HCDR3), a V_{L} domain CDR1 (LCDR1), a V_{L} domain CDR2 (LCDR2), and a V_{L} domain CDR3 (LCDR3). Although all combinations of six (6) CDRs chosen from the CDR amino acid sequences described above are permissible and within the scope of the disclosure, certain combinations of the six (6) CDRs are provided herein.

[0902] Although all possible pairing of V_{H} domains and V_{L} domains chosen from the V_{H} and V_{L} domain amino acid sequences listed above are permissible and within the scope of the disclosure, some embodiments provide certain combinations of V_{H} and V_{L} domains.

[0903] In some embodiments, anti-FLT3 antibodies, antigen binding fragments thereof, and synthetic antigen-binding proteins such as scFvs may also comprise a combination of a variable heavy chain domain and a variable light chain domain wherein the variable heavy chain domain comprises a V_{H} sequence with at least 90% sequence identity, or at least 95%, 96% 97%, 98% or 99% sequence identity, to the variable heavy chain amino acid sequences shown above and/or wherein the variable light chain domain comprises a V_{L} sequence with at least 90% sequence identity, or at least 95%, 96% 97%, 98% or 99% sequence identity, to the variable light chain domain amino acid sequences shown above. The specific V_{H} and V_{L} pairings or combinations in parts (i) through may be preserved for anti-FLT3 antibodies having V_{H} and V_{L} domain sequences with a particular amino acid sequence percent identity to these reference sequences disclosed herein.

[0904] For all embodiments wherein the variable heavy chain and/or light chain domains of the antibodies, antigen binding fragments thereof, and synthetic antigen-binding proteins such as scFvs are defined by a particular amino acid sequence percent identity to a reference sequence, the V_{H} and/or V_{L} domains may retain identical CDR sequences to those present in the reference sequence such that the variation is present only within the framework regions.

### Anti-CLL-1 Polypeptides

[0905] In some embodiments of the disclosure are provided anti-CLL-1 polypeptides, including mAbs, antigen binding fragments thereof, and synthetic fusion proteins such as single-chain variable fragments (scFvs), comprising one or more complementarity-determining regions (CDRs) which recognize and bind CLL-1. In some embodiments, the anti-CLL-1 polypeptides, including mAbs, antigen binding fragments thereof, and synthetic fusion proteins such as single-chain variable fragments (scFvs) selectively bind a first polymorphic variant of CLL-1 over a second polymorphic variant of CLL-1; or selectively binds the second polymorphic variant of CLL-1 over the first polymorphic variant. In some embodiments, the binding is at least 2-fold, 10-fold, or 30-fold selective.

[0906] In some embodiments, the first polymorphic variant of CLL-1 is K224 and the second polymorphic variant of CLL-1 is Q244; or first polymorphic variant of CLL-1 is Q224 and the second polymorphic variant of CLL-1 is K244.

[0907] In some embodiments of the disclosure are provided anti-CLL-1 polypeptides, including mAbs, antigen binding fragments thereof, and synthetic fusion proteins such as single-chain variable fragments (scFvs), comprising one or more complementarity-determining regions (CDRs) which recognize and bind CLL-1. Sequences of the CDRs and V_{H} and V_{L} domains for the anti-CD33 polypeptides described herein for binding CLL-1 are provided in Tables and Examples below.

[0908] Provided herein therefore, are a heavy chain variable (V_{H}) domain CDR1 (HCDR1), a V_{H} domain CDR2 (HCDR2), and a V_{H} domain CDR3 (HCDR3), and polypeptides comprising them, wherein the HCDR1 comprises an amino acid sequence chosen from any of SEQ ID NOs 337-360 and 529-550; HCDR2 comprises an amino acid sequence chosen from any of SEQ ID NOs 361-384 and 551-572; and HCDR3 comprises an amino acid sequence chosen from any of SEQ ID NOs 385-408 and 573-594. Also provided are a HCDR1, a HCDR2, and a HCDR3, and polypeptides comprising them, wherein the HCDR1 comprises an amino acid sequence chosen from any of SEQ ID NOs 337-360; HCDR2 comprises an amino acid sequence chosen from any of SEQ ID NOs 361-384; and HCDR3 comprises an amino acid sequence chosen from any of SEQ ID NOs 361-384. Also provided are HCDR1, a HCDR2, and a HCDR3, and polypeptides comprising them, wherein the HCDR1 comprises an amino acid sequence chosen from any of SEQ ID NOs 529-550; HCDR2 comprises an amino acid sequence chosen from any of SEQ ID NOs 551-572; and HCDR3 comprises an amino acid sequence chosen from any of SEQ ID NOs 573-594.

[0909] Also provided is a V_{H} domain comprising one or more of these CDRs. The V_{H} domain of the anti-CLL-1 mAb, antigen binding fragment thereof, or synthetic antigen-binding protein such as an scFv may comprise any one of the listed HCDR1 sequences in combination with any one of the HCDR2 sequences, and in combination with any one of the HCDR3 sequences. However, in certain embodiments, the provided HCDR1, HCDR2, and HCDR3 sequences are derived from a single common V_{H} domain, the examples of which are described herein.

[0910] The anti-CLL-1 mAbs, antigen binding fragments thereof, and synthetic antigen-binding proteins such as scFvs may additionally comprise a light chain variable (V_{L}) domain, which is paired with the V_{H} domain to form an CLL-1 antigen binding domain.

[0911] Provided herein therefore, are a light chain variable (V_{L}) domain CDR1 (LCDR1), a V_{L} domain CDR2 (LCDR2), and a V_{L} domain CDR3 (LCDR3), and polypeptides comprising them, wherein the LCDR1 comprises an amino acid sequence chosen from: SEQ ID NOs 409-432 and 595-616; LCDR2 comprises an amino acid sequence chosen from: SEQ ID NOs 433-456 and 617-638; and LCDR3 comprises an amino acid sequence chosen from: SEQ ID NOs 457-480 and 639-660. Also provided are a LCDR1, a LCDR2, and a LCDR3, and polypeptides comprising them, wherein the LCDR1 comprises an amino acid sequence chosen from any of SEQ ID NOs 409-432; LCDR2 comprises an amino acid sequence chosen from any of SEQ ID NOs 433-456; and LCDR3 comprises an amino acid sequence chosen from any of SEQ ID NOs 433-456. Also provided are a LCDR1, a LCDR2, and a LCDR3, and polypeptides comprising them, wherein the LCDR1 comprises an amino acid sequence chosen from any of SEQ ID NOs 595-616; LCDR2 comprises an amino acid sequence chosen from any of SEQ ID NOs 617-638; and LCDR3 comprises an amino acid sequence chosen from any of SEQ ID NOs 639-660.

[0912] Also provided is a V_{L} domain comprising one or more of these CDRs. The V_{L} domain of the anti-CLL-1 mAb, antigen binding fragments thereof, or synthetic antigen-binding protein such as an scFv may comprise any one of the listed LCDR1 sequences in combination with any one of the LCDR2 sequences, and in combination with any one of the LCDR3 sequences. However, in certain embodiments, the LCDR1, LCDR2, and LCDR3 sequences are derived from a single common V_{L} domain, examples of which are described herein.

[0913] Also provided are mAbs, antigen binding fragments thereof, and synthetic antigen-binding proteins such as scFvs comprising the CDRs, V_{H} domains, and/or V_{L} domain disclosed herein. Any given anti-CLL-1 mAb (and certain antigen-binding fragments thereof or scFv comprising a V_{H} domain paired with a V_{L} domain will comprise a combination of six (6) CDRs: a V_{H} domain CDR1 (HCDR1), a V_{H} domain CDR2 (HCDR2), and a V_{H} domain CDR3 (HCDR3), a V_{L} domain CDR1 (LCDR1), a V_{L} domain CDR2 (LCDR2), and a V_{L} domain CDR3 (LCDR3). Although all combinations of six (6) CDRs chosen from the CDR amino acid sequences described above are permissible and within the scope of the disclosure, certain combinations of the six (6) CDRs are provided herein.

[0914] In some embodiments, the combination of the six (6) CDRs is chosen from the combinations recited in each of Polypeptide No.s 43-88. In some embodiments, the combination of the six (6) CDRs is chosen from the combinations recited in each of Polypeptide No.s 43-66. In some embodiments, the combination of the six (6) CDRs is chosen from the combinations recited in each of Polypeptide No.s 67-88.

[0915] In some embodiments, the anti-CLL-1 mAbs, antigen binding fragments thereof, and synthetic antigen-binding proteins such as scFvs comprise a V_{H} domain chosen from any of SEQ ID NOs 481-504 and 661-682, with amino acid sequences exhibiting at least 90% sequence identity, or at least 95%, 96% 97%, 98% or 99% sequence identity to one of the recited amino acid sequences. In some embodiments, the anti-CD33 mAbs, antigen binding fragments thereof, and synthetic antigen-binding proteins such as scFvs comprise a V_{H} domain chosen from any of SEQ ID NOs 481-504, with amino acid sequences exhibiting at least 90% sequence identity, or at least 95%, 96% 97%, 98% or 99% sequence identity to one of the recited amino acid sequences. In some embodiments, the anti-CD33 mAbs, antigen binding fragments thereof, and synthetic antigen-binding proteins such as scFvs comprise a V_{H} domain chosen from any of SEQ ID NOs 661-682, with amino acid sequences exhibiting at least 90% sequence identity, or at least 95%, 96% 97%, 98% or 99% sequence identity to one of the recited amino acid sequences.

[0916] Alternatively, or in addition, the anti-CD33 mAbs, antigen binding fragments thereof, and synthetic antigen-binding proteins such as scFvs comprise a V_{L} domain having an amino acid sequence chosen from any of SEQ ID NOs 505-528 and 683-704, and amino acid sequences exhibiting at least 90% sequence identity, or at least 95%, 96% 97%, 98% or 99% sequence identity to one of the recited amino acid sequences. In some embodiments, the anti-CD33 mAbs, antigen binding fragments thereof, and synthetic antigen-binding proteins such as scFvs comprise a V_{L} domain having an amino acid sequence chosen from any of SEQ ID NOs 505-528, and amino acid sequences exhibiting at least 90% sequence identity, or at least 95%, 96% 97%, 98% or 99% sequence identity to one of the recited amino acid sequences. In some embodiments, the anti-CD33 mAbs, antigen binding fragments thereof, and synthetic antigen-binding proteins such as scFvs comprise a V_{L} domain having an amino acid sequence chosen from any of SEQ ID NOs 683-704, and amino acid sequences exhibiting at least 90% sequence identity, or at least 95%, 96% 97%, 98% or 99% sequence identity to one of the recited amino acid sequences.

[0917] Although all possible pairing of V_{H} domains and V_{L} domains chosen from the V_{H} and V_{L} domain amino acid sequences listed above are permissible and within the scope of the disclosure, some embodiments provide certain combinations of V_{H} and V_{L} domains. Accordingly, in some embodiments, anti-CD33 mAbs, antigen binding fragments thereof, and synthetic antigen-binding proteins such as scFvs comprise a combination of a V_{H} domain and a V_{L} domain, wherein the combination is chosen from those recited in Polypeptide No.s 43-88, e.g.:
[0918] SEQ ID NO: 481 and SEQ ID NO: 505;
[0919] SEQ ID NO: 482 and SEQ ID NO: 506;
[0920] SEQ ID NO: 483 and SEQ ID NO: 507;
[0921] SEQ ID NO: 484 and SEQ ID NO: 508;
[0922] SEQ ID NO: 485 and SEQ ID NO: 509;
[0923] SEQ ID NO: 486 and SEQ ID NO: 510;
[0924] SEQ ID NO: 487 and SEQ ID NO: 511;
[0925] SEQ ID NO: 488 and SEQ ID NO: 512;
[0926] SEQ ID NO: 489 and SEQ ID NO: 513;
[0927] SEQ ID NO: 490 and SEQ ID NO: 514;
[0928] SEQ ID NO: 491 and SEQ ID NO: 515;
[0929] SEQ ID NO: 492 and SEQ ID NO: 516;
[0930] SEQ ID NO: 493 and SEQ ID NO: 517;
[0931] SEQ ID NO: 494 and SEQ ID NO: 518;
[0932] SEQ ID NO: 495 and SEQ ID NO: 519;
[0933] SEQ ID NO: 496 and SEQ ID NO: 520;
[0934] SEQ ID NO: 497 and SEQ ID NO: 521;
[0935] SEQ ID NO: 498 and SEQ ID NO: 522;
[0936] SEQ ID NO: 499 and SEQ ID NO: 523;
[0937] SEQ ID NO: 500 and SEQ ID NO: 524;
[0938] SEQ ID NO: 501 and SEQ ID NO: 525;
[0939] SEQ ID NO: 502 and SEQ ID NO: 526;
[0940] SEQ ID NO: 503 and SEQ ID NO: 527;
[0941] SEQ ID NO: 504 and SEQ ID NO: 528;
[0942] SEQ ID NO: 661 and SEQ ID NO: 683;
[0943] SEQ ID NO: 662 and SEQ ID NO: 684;
[0944] SEQ ID NO: 663 and SEQ ID NO: 685;
[0945] SEQ ID NO: 664 and SEQ ID NO: 686;
[0946] SEQ ID NO: 665 and SEQ ID NO: 687;
[0947] SEQ ID NO: 666 and SEQ ID NO: 688;
[0948] SEQ ID NO: 667 and SEQ ID NO: 689;
[0949] SEQ ID NO: 668 and SEQ ID NO: 690;
[0950] SEQ ID NO: 669 and SEQ ID NO: 691;
[0951] SEQ ID NO: 670 and SEQ ID NO: 692;
[0952] SEQ ID NO: 671 and SEQ ID NO: 693;
[0953] SEQ ID NO: 672 and SEQ ID NO: 694;
[0954] SEQ ID NO: 673 and SEQ ID NO: 695;
[0955] SEQ ID NO: 674 and SEQ ID NO: 696;
[0956] SEQ ID NO: 675 and SEQ ID NO: 697;
[0957] SEQ ID NO: 676 and SEQ ID NO: 698;
[0958] SEQ ID NO: 677 and SEQ ID NO: 699;
[0959] SEQ ID NO: 678 and SEQ ID NO: 700;
[0960] SEQ ID NO: 679 and SEQ ID NO: 701;
[0961] SEQ ID NO: 680 and SEQ ID NO: 702;
[0962] SEQ ID NO: 681 and SEQ ID NO: 703;
[0963] and
[0964] SEQ ID NO: 682 and SEQ ID NO: 704.

[0965] In some embodiments, anti-CD33 mAbs, antigen binding fragments thereof, and synthetic antigen-binding proteins such as scFvs comprise a combination of a V_{H} domain and a V_{L} domain, wherein the combination is chosen from those recited in Polypeptide No.s 43-66, e.g.:
[0966] SEQ ID NO: 481 and SEQ ID NO: 505;
[0967] SEQ ID NO: 482 and SEQ ID NO: 506;
[0968] SEQ ID NO: 483 and SEQ ID NO: 507;
[0969] SEQ ID NO: 484 and SEQ ID NO: 508;
[0970] SEQ ID NO: 485 and SEQ ID NO: 509;
[0971] SEQ ID NO: 486 and SEQ ID NO: 510;
[0972] SEQ ID NO: 487 and SEQ ID NO: 511;
[0973] SEQ ID NO: 488 and SEQ ID NO: 512;
[0974] SEQ ID NO: 489 and SEQ ID NO: 513;
[0975] SEQ ID NO: 490 and SEQ ID NO: 514;
[0976] SEQ ID NO: 491 and SEQ ID NO: 515;
[0977] SEQ ID NO: 492 and SEQ ID NO: 516;
[0978] SEQ ID NO: 493 and SEQ ID NO: 517;
[0979] SEQ ID NO: 494 and SEQ ID NO: 518;
[0980] SEQ ID NO: 495 and SEQ ID NO: 519;
[0981] SEQ ID NO: 496 and SEQ ID NO: 520;
[0982] SEQ ID NO: 497 and SEQ ID NO: 521;
[0983] SEQ ID NO: 498 and SEQ ID NO: 522;
[0984] SEQ ID NO: 499 and SEQ ID NO: 523;
[0985] SEQ ID NO: 500 and SEQ ID NO: 524;
[0986] SEQ ID NO: 501 and SEQ ID NO: 525;
[0987] SEQ ID NO: 502 and SEQ ID NO: 526;
[0988] SEQ ID NO: 503 and SEQ ID NO: 527;
[0989] and
[0990] SEQ ID NO: 504 and SEQ ID NO: 528.

[0991] In some embodiments, anti-CD33 mAbs, antigen binding fragments thereof, and synthetic antigen-binding proteins such as scFvs comprise a combination of a V_{H} domain and a V_{L} domain, wherein the combination is chosen from those recited in Polypeptide No.s 67-88, e.g.:
[0992] SEQ ID NO: 661 and SEQ ID NO: 683;
[0993] SEQ ID NO: 662 and SEQ ID NO: 684;
[0994] SEQ ID NO: 663 and SEQ ID NO: 685;
[0995] SEQ ID NO: 664 and SEQ ID NO: 686;
[0996] SEQ ID NO: 665 and SEQ ID NO: 687;
[0997] SEQ ID NO: 666 and SEQ ID NO: 688;
[0998] SEQ ID NO: 667 and SEQ ID NO: 689;
[0999] SEQ ID NO: 668 and SEQ ID NO: 690;
[1000] SEQ ID NO: 669 and SEQ ID NO: 691;
[1001] SEQ ID NO: 670 and SEQ ID NO: 692;
[1002] SEQ ID NO: 671 and SEQ ID NO: 693;
[1003] SEQ ID NO: 672 and SEQ ID NO: 694;
[1004] SEQ ID NO: 673 and SEQ ID NO: 695;
[1005] SEQ ID NO: 674 and SEQ ID NO: 696;
[1006] SEQ ID NO: 675 and SEQ ID NO: 697;
[1007] SEQ ID NO: 676 and SEQ ID NO: 698;
[1008] SEQ ID NO: 677 and SEQ ID NO: 699;
[1009] SEQ ID NO: 678 and SEQ ID NO: 700;
[1010] SEQ ID NO: 679 and SEQ ID NO: 701;
[1011] SEQ ID NO: 680 and SEQ ID NO: 702;
[1012] SEQ ID NO: 681 and SEQ ID NO: 703;
[1013] and
[1014] SEQ ID NO: 682 and SEQ ID NO: 704.

[1015] In some embodiments, anti-CLL-1 antibodies, antigen binding fragments thereof, and synthetic antigen-binding proteins such as scFvs may also comprise a combination of a variable heavy chain domain and a variable light chain domain wherein the variable heavy chain domain comprises a V_{H} sequence with at least 90% sequence identity, or at least 95%, 96% 97%, 98% or 99% sequence identity, to the variable heavy chain amino acid sequences shown above and/or wherein the variable light chain domain comprises a V_{L} sequence with at least 90% sequence identity, or at least 95%, 96% 97%, 98% or 99% sequence identity, to the variable light chain domain amino acid sequences shown above. The specific V_{H} and V_{L} pairings or combinations in parts (i) through may be preserved for anti-CLL-1 antibodies having V_{H} and V_{L} domain sequences with a particular amino acid sequence percent identity to these reference sequences disclosed herein.

[1016] For all embodiments wherein the variable heavy chain and/or light chain domains of the antibodies, antigen binding fragments thereof, and synthetic antigen-binding proteins such as scFvs are defined by a particular amino acid sequence percent identity to a reference sequence, the V_{H} and/or V_{L} domains may retain identical CDR sequences to those present in the reference sequence such that the variation is present only within the framework regions.

### Chimeric Antigen Receptors (CARs) and CAR-Bearing Immune Effector Cells

[1017] Also provided herein are chimeric antigen receptors (CARs; and transgenic T-cell receptors, TCRs) comprising polypeptides as disclosed herein, e.g. as disclosed in Tables 2, 3, 12 and 13, and immune effector cells expressing them. A CAR is a recombinant fusion protein comprising: 1) an extracellular ligand-binding domain, i.e., an antigen-recognition domain, 2) a hinge domain, 3) a transmembrane domain, and 4) a cytoplasmic signaling domain, 5) and optionally, a co-stimulatory domain.

[1018] Methods for CAR design, delivery and expression, and the manufacturing of clinical-grade CAR-T cell populations are known in the art. CAR designs are generally tailored to each cell type.

[1019] The extracellular ligand-binding domain of a chimeric antigen receptor recognizes and specifically binds an antigen, typically a surface-expressed antigen of a malignant cell. The extracellular ligand-binding domain specifically binds an antigen when, for example, it binds the antigen with an affinity constant or affinity of interaction (K_{D}) between about 0.1 pM to about 10 μM, or about 0.1 pM to about 1 μM, or about 0.1 pM to about 100 nM. Methods for determining the affinity of interaction are known in the art. An extracellular ligand-binding domain can also be said to specifically bind a first polymorphic variant of an antigen when it binds it selectively over a second polymorphic variant of the same antigen.

[1020] An extracellular ligand-binding domain suitable for use in a CAR may be any antigen-binding polypeptide, a wide variety of which are known in the art. In some instances, the extracellular ligand-binding domain is a single chain Fv (scFv). Other antibody based recognition domains (cAb VHH (camelid antibody variable domains) and humanized versions thereof, lgNAR V_{H} (shark antibody variable domains) and humanized versions thereof, sdAb V_{H} (single domain antibody variable domains) and “camelized” antibody variable domains are suitable for use. In some instances, T-cell receptor (TCR) based recognition domains such as single chain TCR (scTv, single chain two-domain TCR containing VαVβ) are also suitable for use. In some embodiments, the extracellular ligand-binding domain is constructed from a natural binding partner, or a functional fragment thereof, to a target antigen. For example, CARs in general may be constructed with a portion of the APRIL protein, targeting the ligand for the B-Cell Maturation Antigen (BCMA) and Transmembrane Activator and CAML Interactor (TACI), effectively co-targeting both BCMA and TACI for the treatment of multiple myeloma.

[1021] The targeted antigen to which the CAR binds via its extracellular ligand-binding domain may be an antigen that is expressed on a malignant myeloid (AML) cell, T cell or other cell. Antigens expressed on a malignant myeloid (AML) cells include CD33, FLT3, CD123, and CLL-1. Antigens expressed on T cells include CD2, CD3, CD4, CD5, CD7, TCRα (TRAC), and TCRβ. Antigens expressed on malignant plasma cells include BCMA, CS1, CD38, CD79A, CD79B, CD138, and CD19. Antigens expressed on malignant B cells include CD19, CD20, CD21, CD22, CD23, CD24, CD25, CD27, CD38, and CD45.

[1022] Typically, the extracellular ligand-binding domain is linked to the intracellular domain of the chimeric antigen receptor by a transmembrane (TM) domain. A peptide hinge connects the extracellular ligand-binding domain to the transmembrane domain. A transmembrane domain traverses the cell membrane, anchors the CAR to the T cell surface, and connects the extracellular ligand-binding to the cytoplasmic signaling domain, thus impacting expression of the CAR on the T cell surface.

[1023] The transmembrane domain may be derived either from a natural or from a synthetic source. Where the source is natural, the domain may be derived from any membrane-bound or transmembrane protein. For example, the transmembrane region may be derived from (i.e. comprise at least the transmembrane region(s) of) the alpha, beta or zeta chain of the T-cell receptor, CD28, CD3 epsilon, CD45, CD4, CD5, CD8 (e.g., CD8 alpha, CD8 beta), CD9, CD16, CD22, CD33, CD37, CD64, CD80, CD86, CD134, CD154, KIRDS2, OX40, CD2, CD27, LFA-1 (CD11a, CD18), ICOS (CD278), 4-1BB (CD137), GITR, CD40, BAFFR, HVEM (LIGHTR), SLAMF7, NKp80 (KLRF1), CD160, CD19, IL2R beta, IL2R gamma, IL7R α, ITGA1, VLA1, CD49a, ITGA4, IA4, CD49D, ITGA6, VLA-6, CD49f, ITGAD, CD11d, ITGAE, CD103, ITGAL, CD11a, LFA-1, ITGAM, CD11b, ITGAX, CD11c, ITGB1, CD29, ITGB2, CD18, LFA-1, ITGB7, TNFR2, DNAM1 (CD226), SLAMF4 (CD244, 2B4), CD84, CD96 (Tactile), CEACAM1, CRTAM, Ly9 (CD229), CD160 (BY55), PSGL1, CD100 (SEMA4D), SLAMF6 (NTB-A, Ly108), SLAM (SLAMFI, CD150, IPO-3), BLAME (SLAMF8), SELPLG (CD162), LTBR, and PAG/Cbp. Alternatively, the transmembrane domain can be synthetic and comprise predominantly hydrophobic amino acid residues (e.g., leucine and valine). In some cases, a triplet of phenylalanine, tryptophan and valine will be found at each end of a synthetic transmembrane domain. In some embodiments, the transmembrane domain is derived from the T-cell surface glycoprotein CD8 alpha chain isoform 1 precursor (NP_001139345.1) or CD28. A short oligo- or polypeptide linker, such as between 2 and 10 amino acids in length, may form the linkage between the transmembrane domain and the endoplasmic domain of the CAR. In some embodiments, the CAR has more than one transmembrane domain, which can be a repeat of the same transmembrane domain, or can be different transmembrane domains.

[1024] NK cells express a number of transmembrane (TM) adapters that signal activation, that are triggered via association with activating receptors. This provides an NK cell specific signal enhancement via engineering the TM domains from activating receptors, and thereby harness endogenous adapters. The TM adapter can be any endogenous TM adapter capable of signaling activation. In some embodiments, the TM adapter may be chosen from FceR1γ (ITAMx1), CD3ζ (ITAMx3), DAP12 (ITAMx1), or DAP10 (YxxM/YINM), NKG2D, FcγRIIIa, NKp44, NKp30, NKp46, actKIR, NKG2C, CD8α, and IL15Rb.

[1025] The CAR can further comprise a hinge region between extracellular ligand-binding domain and said transmembrane domain. The term “hinge region” (equivalently, “hinge” or “spacer”) generally means any oligo- or polypeptide that functions to link the transmembrane domain to the extracellular ligand-binding domain. In particular, hinge region is used to provide more flexibility and accessibility for the extracellular ligand binding domain, and can confer stability for efficient CAR expression and activity. A hinge region may comprise up to 300 amino acids, preferably 10 to 100 amino acids and most preferably 25 to 50 amino acids. Hinge region may be derived from all or parts of naturally-occurring molecules such as CD28, 4-1BB (CD137), OX-40 (CD134), CD3ζ, the T cell receptor α or β chain, CD45, CD4, CD5, CD8, CD8a, CD9, CD16, CD22, CD33, CD37, CD64, CD80, CD86, ICOS, CD154 or from all or parts of an antibody constant region. In some embodiments, for example, the hinge sequence is derived from a CD8a molecule or a CD28 molecule. Alternatively, the hinge region may be a synthetic sequence that corresponds to a naturally-occurring hinge sequence or the hinge region may be an entirely synthetic hinge sequence. In one embodiment, the hinge domain comprises a part of human CD8a, FcγRIIIα receptor, or IgGI, and have at least 80%, 90%, 95%, 97%, or 99% sequence identity thereto.

[1026] After antigen recognition, the cytoplasmic signaling domain transmits a signal to the immune effector cell, activating at least one of the normal effector functions of the immune effector cell. Effector function of a T cell, for example, may be cytolytic activity or helper activity including the secretion of cytokines. While usually the entire cytoplasmic signaling domain can be employed, in many cases it is not necessary to use the entire chain. To the extent that a truncated portion of the cytoplasmic signaling domain is used, such truncated portion may be used in place of the intact chain as long as it transduces the effector function

[1027] Cytoplasmic signaling sequences that regulate primary activation of the TCR complex that act in a stimulatory manner may contain signaling motifs which are known as immunoreceptor tyrosine-based activation motifs (ITAMs). Examples of ITAM containing cytoplasmic signaling sequences include those derived from CD8, CD3ζ, CD3δ, CD3γ, CD3δ, CD32 (Fc gamma RIIa), DAP10, DAP12, CD79a, CD79b, FcγRIγ, FcγRIIIγ, FcεRIβ (FCERIB), and FcεRIγ (FCERIG).

[1028] First-generation CARs typically have the cytoplasmic signaling domain from the CD3 chain, which is the primary transmitter of signals from endogenous TCRs. Second-generation CARs add cytoplasmic signaling domains from various co-stimulatory protein receptors (e.g., CD28, 4-1BB, ICOS) to the cytoplasmic signaling domain of the CAR to provide additional signals to the T cell.

[1029] A “costimulatory domain” is derived from the intracellular signaling domains of costimulatory proteins that enhance cytokine production, proliferation, cytotoxicity, and/or persistence in vivo. Preclinical studies have indicated that the second generation of CAR designs improves the antitumor activity of T cells. More recent, third-generation, and later generation, CARs combine multiple costimulatory domains to further augment potency. T cells grafted with these CARs have demonstrated improved expansion, activation, persistence, and tumor-eradicating efficiency independent of costimulatory receptor/ligand interaction.

[1030] For example, the cytoplasmic signaling domain of the CAR can be designed to comprise the signaling domain (e.g., CD3ζ) by itself or combined with any other desired cytoplasmic domain(s) useful in the context of the CAR. For example, the cytoplasmic domain of the CAR can comprise a signaling domain (e.g., CD3ζ) chain portion and a costimulatory signaling region. The co-stimulatory signaling region refers to a portion of the CAR comprising the intracellular domain of a co-stimulatory molecule. Examples of such molecules include CD27, CD28, 4-1BB (CD137), OX40, CD30, CD40, ICOS, LFA-1, CD2, CD7, LIGHT, NKG2C, B7-H3, and a ligand that specifically binds with CD83, CD8, CD4, b2c, CD80, CD86, DAP10, DAP12, MyD88, BTNL3, and NKG2D.

[1031] In some embodiments, the cytoplasmic signaling domain is a CD3 zeta (CD3ζ) signaling domain. In some embodiments, the co-stimulatory domain comprises the cytoplasmic domain of CD28, 4-1BB, or a combination thereof. In some cases, the co-stimulatory signaling region contains 1, 2, 3, or 4 cytoplasmic domains of one or more intracellular signaling and/or co-stimulatory molecules.

[1032] The co-stimulatory signaling domain(s) may contain one or more mutations in the cytoplasmic domains of CD28 and/or 4-1BB that enhance signaling. In some embodiments, the disclosed CARs comprises a co-stimulatory signaling region comprising a mutated form of the cytoplasmic domain of CD28 with altered phosphorylation at Y206 and/or Y218. In some embodiments, the disclosed CAR comprises an attenuating mutation at Y206, which will reduce the activity of the CAR. In some embodiments, the disclosed CAR comprises an attenuating mutation at Y218, which will reduce expression of the CAR. Any amino acid residue, such as alanine or phenylalanine, can be substituted for the tyrosine to achieve attenuation. In some embodiments, the tyrosine at Y206 and/or Y218 is substituted with a phosphomimetic residue. In some embodiments, the disclosed CAR substitution of Y206 with a phosphomimetic residue, which will increase the activity of the CAR. In some embodiments, the disclosed CAR comprises substitution of Y218 with a phosphomimetic residue, which will increase expression of the CAR. For example, the phosphomimetic residue can be phosphotyrosine. In some embodiments, a CAR may contain a combination of phosphomimetic amino acids and substitution(s) with non-phosphorylatable amino acids in different residues of the same CAR. For instance, a CAR may contain an alanine or phenylalanine substitution in Y209 and/or Y191 plus a phosphomimetic substitution in Y206 and/or Y218.

[1033] In some embodiments, the disclosed CARs comprises one or more 4-1BB domains with mutations that enhance binding to specific TRAF proteins, such as TRAF1, TRAF2, TRAF3, TRAF4, TRAF5, TRAF6, or any combination thereof. In some cases, the 41BB mutation enhances TRAF1- and/or TRAF2-dependent proliferation and survival of the T-cell, e.g. through NF-kB. In some cases, the 4-1BB mutation enhances TRAF3-dependent antitumor efficacy, e.g. through IRF7/INFβ. Therefore, the disclosed CARs can comprise cytoplasmic domain(s) of 4-1BB having at least one mutation in these sequences that enhance TRAF-binding and/or enhance NFκB signaling.

[1034] Also as disclosed herein, TRAF proteins can in some cases enhance CAR T cell function independent of NFκB and 4-1BB. For example, TRAF proteins can in some cases enhance CD28 co-stimulation in T cells. Therefore, also disclosed herein are immune effector cells co-expressing CARs with one or more TRAF proteins, such as TRAF1, TRAF2, TRAF3, TRAF4, TRAF5, TRAF6, or any combination thereof. In some cases, the CAR is any CAR that targets a tumor antigen. For example, first-generation CARs typically had the intracellular domain from the CD3 chain, while second-generation CARs added intracellular signaling domains from various costimulatory protein receptors (e.g., CD28, 4-1BB, ICOS) to the cytoplasmic signaling domain of the CAR to provide additional signals to the T cell. In some cases, the CAR is the disclosed CAR with enhanced 4-1BB activation.

[1035] Variations on CAR components may be advantageous, depending upon the type of cell in which the CAR is expressed.

[1036] For example, in NK cells, in some embodiments, the transmembrane domain can be a sequence associated with NKG2D, FcγRIIIa, NKp44, NKp30, NKp46, actKIR, NKG2C, or CD8α. In certain embodiments, the NK cell is a ML-NK or CIML-NK cell and the TM domain is CD8α. Certain™ domains that do not work well in NK cells generally may work in a subset; CD8α, for example, works in ML-NKs but not NK cells generally.

[1037] Similarly, in NK cells, in some embodiments, the intracellular signaling domain(s) can be any co-activating receptor(s) capable of functioning in an NK cell, such as, for example, CD28, CD137/41BB (TRAF, NFkB), CD134/OX40, CD278/ICOS, DNAM-1 (Y-motif), NKp80 (Y-motif), 2B4 (SLAMF)::ITSM, CRACC (CS1/SLAMF7)::ITSM, CD2 (Y-motifs, MAPK/Erk), CD27 (TRAF, NFkB), or integrins (e.g., multiple integrins).

[1038] Similarly, in NK cells, in some embodiments, an intracellular signaling domain can be a cytokine receptor capable of functioning in an NK cell. For example, a cytokine receptor can be a cytokine receptor associated with persistence, survival, or metabolism, such as IL-2/15Rbyc::Jak1/3, STAT3/5, PI3K/mTOR, MAPK/ERK. As another example, a cytokine receptor can be a cytokine receptor associated with activation, such as IL-18R::NFkB. As another example, a cytokine receptor can be a cytokine receptor associated with IFN-γ production, such as IL-12R::STAT4. As another example, a cytokine receptor can be a cytokine receptor associated with cytotoxicity or persistence, such as IL-21R::Jak3/Tyk2, or STAT3. As another example, an intracellular signaling domain can be a TM adapter, such as FceR1γ (ITAMx1), CD3ζ (ITAMx3), DAP12 (ITAMx1), or DAP10 (YxxM/YINM). As another example, CAR intracellular signaling domains (also known as endodomains) can be derived from costimulatory molecules from the CD28 family (such as CD28 and ICOS) or the tumor necrosis factor receptor (TNFR) family of genes (such as 4-1BB, OX40, or CD27). The TNFR family members signal through recruitment of TRAF proteins and are associated with cellular activation, differentiation and survival. Certain signaling domains that may not work well in all NK cells generally may work in a subset; CD28 or 4-1BB, for example, work in ML-NKs.

[1039] Methods of Making CARs and CAR-Bearing Cells

[1040] The chimeric antigen receptor (CAR) construct, which encodes the chimeric receptor can be prepared in conventional ways. Since, for the most part, natural sequences are employed, the natural genes are isolated and manipulated, as appropriate (e.g., when employing a Type II receptor, the immune signaling receptor component may have to be inverted), so as to allow for the proper joining of the various components. Thus, the nucleic acid sequences encoding for the N-terminal and C-terminal proteins of the chimeric receptor can be isolated by employing the polymerase chain reaction (PCR), using appropriate primers which result in deletion of the undesired portions of the gene. Alternatively, restriction digests of cloned genes can be used to generate the chimeric construct. In either case, the sequences can be selected to provide for restriction sites which are blunt-ended, or have complementary overlaps.

[1041] The various manipulations for preparing the chimeric construct can be carried out in vitro and in particular embodiments the chimeric construct is introduced into vectors for cloning and expression in an appropriate host using standard transformation or transfection methods. Thus, after each manipulation, the resulting construct from joining of the DNA sequences is cloned, the vector isolated, and the sequence screened to ensure that the sequence encodes the desired chimeric receptor. The sequence can be screened by restriction analysis, sequencing, or the like.

[1042] A chimeric construct can be introduced into immune effector cells as naked DNA or in a suitable vector. Methods of stably transfecting immune effector cells by electroporation using naked DNA are known in the art. Naked DNA generally refers to the DNA encoding a chimeric receptor contained in a plasmid expression vector in proper orientation for expression.

[1043] Alternatively, a viral vector (e.g., a retroviral vector, adenoviral vector, adeno-associated viral vector, or lentiviral vector) can be used to introduce the chimeric construct into immune cell, e.g., T cells. Suitable vectors are non-replicating in the immune effector cells of the subject. A large number of vectors are known which are based on viruses, where the copy number of the virus maintained in the cell is low enough to maintain the viability of the cell. Illustrative vectors include the pFB-neo vectors (STRATAGENE™) as well as vectors based on HIV, SV40, EBV, HSV or BPV. Once it is established that the transfected or transduced immune effector cell is capable of expressing the chimeric receptor as a surface membrane protein with the desired regulation and at a desired level, it can be determined whether the chimeric receptor is functional in the host cell to provide for the desired signal induction (e.g., production of Rantes, Mip1-alpha, GM-CSF upon stimulation with the appropriate ligand).

[1044] Engineered CARs may be introduced into CAR-bearing immune effector cells using retroviruses, which efficiently and stably integrate a nucleic acid sequence encoding the chimeric antigen receptor into the target cell genome. Other methods known in the art include, but are not limited to, lentiviral transduction, transposon-based systems, direct RNA transfection, and CRISPR/Cas systems (e.g., type I, type II, or type III systems using a suitable Cas protein such Cas3, Cas4, Cas5, Cas5e (or CasD), Cash, Cas6e, Cas6f, Cas7, Cas8a1, Cas8a2, Cas8b, Cas8c, Cas9, Cas10, Cas1 Od, CasF, CasG, CasH, Csy1, Csy2, Csy3, Cse1 (or CasA), Cse2 (or CasB), Cse3 (or CasE), Cse4 (or CasC), Csc1, Csc2, Csa5, Csn2, Csm2, Csm3, Csm4, Csm5, Csm6, Cmr1, Cmr3, Cmr4, Cmr5, Cmr6, Csb1, Csb2, Csb3, Csx17, Csx14, Csx10, Csx16, CsaX, Csx3, Csz1, Csx15, Csf1, Csf2, Csf3, Csf4, and Cu1966, etc.). Zinc finger nucleases (ZFNs) and transcription activator-like effector nucleases (TALENs) may also be used. See, e.g., Shearer R F and Saunders D N, “Experimental design for stable genetic manipulation in mammalian cell lines: lentivirus and alternatives,” Genes Cells 2015 January; 20(1):1-10.

[1045] Amino acid sequences for selected components which may be used to construct a CAR are disclosed below in Table 1.

TABLE 1
Amino acid sequences of selected CAR components.

| Functional domains | SEQ ID NO: | Amino acid sequence |
|---|---|---|
| CD8α signal peptide | 1521 | MALPVTALLLPLALLLHAARP |
| (variant 1) | | |
| CD8α signal peptide | 1522 | MALPVTALLLPLALLLHAA |
| (variant 2) | | |
| CD8α signal peptide | 1523 | MALPVTALLLP |
| (variant 3) | | |
| CD8α signal peptide | 1524 | PVTALLLPLALL |
| (variant 4) | | |
| CD8α signal peptide | 1525 | LLLPLALLLHAARP |
| (variant 5) | | |
| CD8α hinge | 1526 | TTTPAPRPPTPAPTIASQPLSLRPEACRPA |
| | | AGGAVHTRGLDFACD |
| CD28 | 1527 | FWVLVVVGGVLACYSLLVTVAFIIFWV |
| Transmembrane | | |
| (Tₘ) domain | | |
| Surface glycoprotein | 1528 | MALPVTALLLPLALLLHAARPSQFRVSP |
| CD8 alpha chain | | LDRTWNLGETVELKCQVLLSNPTSGCS |
| isoform 1 precursor | | WLFQPRGAAASPTFLLYLSQNKPKAAEG |
| (NP_001139345.1) | | LDTQRFSGKRLGDTFVLTLSDFRRENEG |
| | | YYFCSALSNSIMYFSHFVPVFLPAKPTTT |
| | | PAPRPPTPAPTIASQPLSLRPEACRPAAG |
| | | GAVHTRGLDFACDIYIWAPLAGTCGVLL |
| | | LSLVITLYCNHRNRRRVCKCPRPVVKSG |
| | | DKPSLSARYV |
| 4-1BB costimulatory | 1529 | KRGRKKLLYIFKQPFMRPVQTTQEEDGC |
| domain | | SCRFPEEEEGGCEL |
| CD28 costimulatory | 1530 | RSKRSRLLHSDYMNMTPRRPGPTRKHY |
| domain | | QPYAPPRDFAAYRS |
| CD3 zeta (ζ) | 1531 | RVKFSRSADAPAYKQGQNQLYNELNLG |
| | | RREEYDVLDKRRGRDPEMGGKPRRKNP |
| | | QEGLYNELQKDKMAEAYSEIGMKGERR |
| | | RGKGHDGLYQGLSTATKDTYDALHMQ |
| | | ALPPR |
| P2A peptide | 1532 | GSGATNFSLLKQAGDVEENPGP |
| (GGGGS) linker | 1533 | GGGGS |
| (GGGGS)₂ linker | 1534 | GGGGSGGGGS |
| (GGGGS)₃ linker | 1535 | GGGGSGGGGSGGGGS |
| (GGGGS)₄ linker | 1536 | GGGGSGGGGSGGGGSGGGGS |
| hCD34 | 1537 | MPRGWTALCLLSLLPSGFMSLDNNGTA |
| | | TPELPTQGTFSNVSTNVSYQETTTPSTLG |
| | | STSLHPVSQHGNEATTNITETTVKFTSTS |
| | | VITSVYGNTNSSVQSQTSVISTVFTTPAN |
| | | VSTPETTLKPSLSPGNVSDLSTTSTSLATS |
| | | PTKPYTSSSPILSDIKAEIKCSGIREVKLT |
| | | QGICLEQNKTSSCAEFKKDRGEGLARVL |
| | | CGEEQADADAGAQVCSLLLAQSEVRPQ |
| | | CLLLVLANRTEISSKLQLMKKHQSDLKK |
| | | LGILDFTEQDVASHQSYSQKTLIALVTSG |
| | | ALLAVLGITGYFLMNRRSWSPI |
| Human-Herpes | 1538 | MPRGWTALCLLSLLPSGFMSLDNNGTA |
| Simplex Virus-1 | | TPELPTQGTFSNVSTNVSYQETTTPSTLG |
| (HSV) - thymidine | | STSLHPVSQHGNEATTNITETTVKFTSTS |
| kinase (TK) | | VITSVYGNTNSSVQSQTSVISTVFTTPAN |
| | | VSTPETTLKPSLSPGNVSDLSTTSTSLATS |
| | | PTKPYTSSSPILSDIKAEIKCSGIREVKLT |
| | | QGICLEQNKTSSCAEFKKDRGEGLARVL |
| | | CGEEQADADAGAQVCSLLLAQSEVRPQ |
| | | CLLLVLANRTEISSKLQLMKKHQSDLKK |
| | | LGILDFTEQDVASHQSYSQKTLIALVTSG |
| | | ALLAVLGITGYFLMNRRSWSPTGEGGG |
| | | GGDLGGVKLPHLFGKRLVEARMASYPC |
| | | HQHASAFDQAARSRGHSNRRTALRPRR |
| | | QQEATEVRLEQKMPTLLRVYIDGPHGM |
| | | GKTTTTQLLVALGSRDDIVYVPEPMTY |
| | | WQVLGASETIANIYTTQHRLDQGEISAG |
| | | DAAVVMTSAQITMGMPYAVTDAVLAP |
| | | HVGGEAGSSHAPPPALTLLLDRHPIAVM |
| | | LCYPAARYLMGSMTPQAVLAFVALIPPT |
| | | LPGTNIVLGALPEDRHIDRLAKRQRPGE |
| | | RLDLAMLAAIRRVYGLLANTVRYLQGG |
| | | GSWWEDWGQLSGTAVPPQGAEPQSNA |
| | | GPRPHIGDTLFTLFRAPELLAPNGDLYNV |
| | | FAWALDVLAKRLRPMHVFILDYDQSPA |
| | | GCRDALLQLTSGMVQTHVTTPGSIPTIC |
| | | DLARTFAREMGEAN |

[1046] Cell-Specific Variations

[1047] The CAR components and construction methods disclosed above are suitable for use in T cells and other immune effector cells, but are not exhaustive. Certain variations may be useful in subsets of cells, and are known in the art.

[1048] For example, in NK cells, the TM domain may be chosen or adapted from NKG2D, FcγRIIIa, NKp44, NKp30, NKp46, actKIR, NKG2C, or CD8α. NK cells also express a number of transmembrane adapters that are triggered via association with activating receptors, providing an NK cell specific signal enhancement. For example, the TM adapter can be chosen or adapted from FceR1γ (ITAMx1), CD3ζ (ITAMx3), DAP12 (ITAMx1), or DAP10 (YxxM/YINM). In certain embodiments, the TM domains and adapters may be paired, e.g.: NKG2D and DAP10, FcγRIIIa and CD3ζ or FceR1γ, NKp44 and DAP12, NKp30 and CD3ζ or FceR1γ, NKp46 and CD3ζ or FceR1γ, actKIR and DAP12, and NKG2C and DAP12.

[1049] In certain embodiments, in NK cells, the hinge domain may be chosen or adapted from, e.g., NKG2, TMα, or CD8.

[1050] In certain embodiments, in NK cells, the intracellular signaling and/or costimulatory domain may comprise one or more of: CD137/41BB (TRAF, NFkB), DNAM-1 (Y-motif), NKp80 (Y-motif), 2B4 (SLAMF)::ITSM, CRACC (CS1/SLAMF7)::ITSM, CD2 (Y-motifs, MAPK/Erk), CD27 (TRAF, NFkB); one or more integrins (e.g., multiple integrins); a cytokine receptor associated with persistence, survival, or metabolism, such as IL-2/15Rbyc::Jak1/3, STAT3/5, PI3K/mTOR, and MAPK/ERK; a cytokine receptor associated with activation, such as IL-18R::NFkB. a cytokine receptor associated with IFN-γ production, such as IL-12R::STAT4; a cytokine receptor associated with cytotoxicity or persistence, such as IL-21R::Jak3/Tyk2, or STAT3; and a TM adapter, as disclosed above. In some embodiments, the NK cell CAR comprises three signaling domains, a TM domain, and optionally, a TM adapter.

[1051] The choice of costimulatory domain may also depend on the phenotype or subtype of the NK cell; for example, in some experiments, 4-1BB may be effective as a costimulatory domain in memory-like (ML) NK cells (including CIMLs) but less efficacious in NK cells. Additionally, signaling domains that may be harnessed that are more selectively expressed in ML NK cells include DNAM-1, CD137, and CD2.

[1052] Immune Effector Cells

[1053] Immune effector cells as disclosed herein may include T cells, NK cells, iNKT cells, and others, for example macrophages, and subtypes thereof.

[1054] Any of these immune effector cells may be transduced with a CAR using techniques known in the art. The resulting CAR-bearing immune effector cells may be used in the immunotherapy of disease, for example cancer, by adoptive cell transfer (ACT) into a subject in need. CAR-bearing immune effector cells include CAR-T cells, CAR-NK cells (and subtypes thereof, such as CAR-ML NK cells and CAR-CIMLs), CAR-iNKT cells, and CAR-macrophages.

[1055] Immune effector cells for use in ACT may be autologous or allogeneic. In some embodiments, the use of allogeneic cells permits deliberate polymorphic mismatch between donor and recipient, which offers certain advantages discussed below.

### T Cells

[1056] T cells are immune cells which express a T cell receptor (TCR) on their surface. Effector T cells include cytotoxic (CD8+) T cells, helper (CD4+) T cells, viral-specific cytotoxic T cells, memory T cells, gamma delta (γδ) T cells.

[1057] T cells may be primary T cells, or may be derived from progenitor cells. T cells can be derived from various sources, including peripheral or cord blood cells, stem cells, or induced pluripotent stem cells (iPSCs), Methods of enriching/isolating, differentiating, and otherwise producing T cells are known in the art.

[1058] iNKT Cells

[1059] Invariant natural killer T cells, also called iNKT cells or type-I NKT cells, represent a distinct lymphocyte population, characterized by expression of an invariant T cell receptor α-chain and certain TCR β-chains (Vα24-Jα18 combined with Vβ11). iNKT TCR-mediated responses are restricted by CD1d, a member of the non-polymorphic CD1 antigen presenting protein family, which promotes the presentation of endogenous and pathogen-derived lipid antigens to the TCR. The prototypical ligand for invariant receptor is α-galactosylceramide (αGalCer). Upon binding of the invariant TCR to CD1d-αGalCer, iNKT will expand. The CD1d gene is monomorphic and expressed by only a few cell types, limiting the potential toxicity of NKT cells in the autologous or allogeneic settings.

[1060] NK Cells

[1061] Natural killer (NK) cells are traditionally considered innate immune effector lymphocytes which mediate host defense against pathogens and antitumor immune responses by targeting and eliminating abnormal or stressed cells not by antigen recognition or prior sensitization, but through the integration of signals from activating and inhibitory receptors. Natural killer (NK) cells are an alternative to T cells for allogeneic cellular immunotherapy since they have been administered safely without major toxicity, do not cause graft versus host disease (GvHD), naturally recognize and eliminate malignant cells, and are amendable to cellular engineering.

[1062] NK cells may be primary NK cells, or may be derived from progenitor cells. NK cells can be derived from various sources, including peripheral or cord blood cells, stem cells, or induced pluripotent stem cells (iPSCs), Methods of enriching/isolating, differentiating, and otherwise producing NK cells are known in the art.

[1063] Memory-Like NK Cells

[1064] In addition to their innate cytotoxic and immunostimulatory activity, NK cells constitute a heterogeneous and versatile cell subset, including persistent memory-like NK populations that mount a robust recall response. ML-NK cells can be produced by stimulation by pro-inflammatory cytokines or activating receptor pathways, either naturally or artificially. ML-NK cells produced by cytokine activation have been used clinically in the setting of leukemia immunotherapy.

[1065] Increased CD56, Ki-67, NKG2A, and increased activating receptors NKG2D, NKp30, and NKp44 have been observed in in vivo differentiated ML NK cells. In addition, in vivo differentiation showed modest decreases in the median expression of CD16 and CD11b. Increased frequency of TRAIL, CD69, CD62L, NKG2A, and NKp30-positive NK cells were observed in ML NK cells compared with both ACT and BL NK cells, whereas the frequencies of CD27+ and CD127+ NK cells were reduced. Finally, unlike in vitro differentiated ML NK cells, in vivo differentiated ML NK cells did not express CD25.

[1066] Cytokine-Induced Memory-Like Natural Killer Cells (CIML-NKs)

[1067] NK cells may be induced to acquire a memory-like phenotype, for example by preactivation with combinations of cytokines, such as interleukin-12 (IL-12), IL-15, and IL-18. These cytokine-induced memory-like (CIML) NK cells (CIML-NKs or CIMLs) exhibit enhanced response upon restimulation with the cytokines or triggering via activating receptors. CIML NK cells may be produced by activation with cytokines such as IL-12, IL-15, and IL-18 and their related family members, or functional fragments thereof, or fusion proteins comprising functional fragments thereof.

[1068] CIML NK cells may be identified by their method of production. CIML cells can be produced by differentiated cytokine-activated (i.e., CIML) NK cells.

[1069] CIML NK cells typically exhibit differential cell surface protein expression patterns when compared to traditional NK cells. Such expression patterns are known in the art and may comprise, for example, increased CD56, CD56 subset CD56dim, CD56 subset CD56bright, CD16, CD94, NKG2A, NKG2D, CD62L, CD25, NKp30, NKp44, and NKp46 (compared to control NK cells) in CIML NK cells (see e.g., Romee et al. Sci Transl Med. 2016 Sep. 21; 8(357):357). Memory-like (ML) and cytokine induced memory-like (CIML) NK cells may also be identified by observed in vitro and in vivo properties, such as enhanced effector functions such as cytotoxicity, improved persistence, increased IFN-γ production, and the like.

[1070] NK cells can be activated using cytokines, such as IL-12/15/18. The NK cells can be incubated in the presence of the cytokines for an amount of time sufficient to form cytokine-induced memory-like (CIML) NK cells. Such techniques are known in the art.

[1071] CD33, FTL-3, and CLL-1-Specific Chimeric Antigen Receptors (CARs)

[1072] CARs generally incorporate an antigen recognition domain from the single-chain variable fragments (scFv) of a monoclonal antibody (mAb) with transmembrane signaling motifs involved in lymphocyte activation (Sadelain M, et al. Nat Rev Cancer 2003 3:35-45). Disclosed herein are CD33, FTL-3, and CLL-1-specific chimeric antigen receptor (CAR) that can be that can be expressed in immune effector cells to enhance antitumor activity against CD33, FTL-3, and CLL-1-expressing tumor cells.

[1073] As discussed above, the disclosed CAR generally comprises: an extracellular ligand binding domain, a hinge domain, a transmembrane domain, a cytoplasmic signaling domain, and optionally a co-stimulatory domain. The extracellular ligand binding domain comprises the CD33-binding region and is responsible for antigen recognition. In another embodiment, the extracellular ligand binding domain comprises a FLT3-binding region. In yet another embodiment, the extracellular ligand binding domain comprises a CLL-1 binding region. The transmembrane domain connects the extracellular ligand binding domain to the cytoplasmic signaling domain and resides within the cell membrane when expressed by a cell. The cytoplasmic signaling domain transmits an activation signal to the immune effector cell after antigen recognition. For example, the cytoplasmic signaling domain may optionally contain costimulatory protein domains, such as CD28, 41BB, and ICOS, that are able to enhance T-cell activation by T-cell receptors.

### Antibodies

[1074] Provided herein are antibodies comprising the polypeptides disclosed herein. In some embodiments the antibodies comprise the V_{H} and V_{L} chains disclosed herein.

[1075] Various forms of antibodies disclosed are contemplated herein. For example, the antibodies can have human frameworks and constant regions of the isotypes, IgA, IgD, IgE, IgG, and IgM, more particularly, IgG1, IgG2, IgG3, IgG4, and in some cases with various mutations to alter Fc receptor function or prevent Fab arm exchange or an antibody fragment, e.g., a F(ab′)2 fragment, a F(ab) fragment, a single chain Fv fragment (scFv), etc.

[1076] In certain embodiments, an antibody provided herein is a human antibody. Human antibodies can be produced using various techniques known in the art. For example, human antibodies may also be generated by isolating Fv clone variable domain sequences selected from human-derived phage display libraries. Such variable domain sequences may then be combined with a desired human constant domain.

[1077] An antibody as provided herein may be a chimeric antibody, e.g. comprising a non-human variable region (e.g., a variable region derived from a mouse, rat, hamster, rabbit, or non-human primate, such as a monkey) and a human constant region, or a “class switched” antibody in which the class or subclass has been changed from that of the parent antibody.

[1078] An antibody as provided herein may be a humanized antibody. Typically, a non-human antibody is humanized to reduce immunogenicity to humans, while retaining the specificity and affinity of the parental non-human antibody. Generally, a humanized antibody comprises one or more variable domains in which HVRs, e.g., CDRs, (or portions thereof) are derived from a non-human antibody, and FRs (or portions thereof) are derived from human antibody sequences. A humanized antibody optionally will also comprise at least a portion of a human constant region. In some embodiments, some FR residues in a humanized antibody are substituted with corresponding residues from a non-human antibody (e.g., the antibody from which the HVR residues are derived), e.g., to restore or improve antibody specificity or affinity.

[1079] Antibodies disclosed herein may also be bispecific or trispecific—i.e., that comprise an antigen-recognition domain that comprises one of the polypeptides disclosed herein and one or more other antigen-recognition domains that binds to another antigen. For example, one arm of the antibody may bind a polymorph of an antigen on an AML cell, and the other arm may bind CD3 or another T-cell target to bring T-cells in proximity to tumor cells. In an example of a trispecific antibody, the antibody would also bind another target on T-cell such as CD28 to enhance activity and persistence of recruited T-cells.

[1080] In some embodiments, a humanized antibody comprises, in addition to the variable regions, a human acceptor framework, e.g. a human immunoglobulin framework or a human consensus framework. Human framework regions that may be used for humanization include but are not limited to framework regions selected using the “best-fit” method, framework regions derived from the consensus sequence of human antibodies of a particular subgroup of light or heavy chain variable regions, human mature (somatically mutated) framework regions or human germline framework regions, and framework regions derived from screening FR libraries.

[1081] In certain embodiments, an antibody provided herein is a multispecific antibody, e.g. a bispecific antibody. Multispecific antibodies are monoclonal antibodies that have binding specificities for at least two different sites. For example, one of the binding specificities is for CD33 and the other is for any other antigen. In certain embodiments, bispecific antibodies may bind to two different epitopes of the same antigen. Bispecific antibodies may also be used to localize cytotoxic agents to cells which express a target antigen. Bispecific antibodies can be prepared as full length antibodies or antibody fragments. Techniques for making multispecific antibodies include, but are not limited to, recombinant co-expression of two immunoglobulin heavy chain-light chain pairs having different specificities, “knob-in-hole” engineering, engineering electrostatic steering effects for making antibody Fc-heterodimeric molecules, cross-linking two or more antibodies or fragments, using leucine zippers to produce bi-specific antibodies, using “diabody” technology for making bispecific antibody fragments, and using single-chain Fv (sFv) dimers.

[1082] Amino acid sequence variants of the antibodies provided herein are contemplated. For example, it may be desirable to improve the binding affinity and/or other biological properties of the antibody. Amino acid sequence variants of an antibody may be prepared by introducing appropriate modifications into the nucleotide sequence encoding the antibody, or by peptide synthesis. Such modifications include, for example, deletions from, and/or insertions into and/or substitutions of residues within the amino acid sequences of the antibody. Any combination of deletion, insertion, and substitution can be made to arrive at the final construct, provided that the final construct possesses the desired characteristics, e.g., antigen-binding.

[1083] Sites of interest for substitutional mutagenesis include the variable regions and framework regions. Amino acids may be grouped according to common side-chain properties:
[1084] (1) hydrophobic: Norleucine, Met, Ala, Val, Leu, He;
[1085] (2) neutral hydrophilic: Cys, Ser, Thr, Asn, Gln;
[1086] (3) acidic: Asp, Glu;
[1087] (4) basic: His, Lys, Arg;
[1088] (5) residues that influence chain orientation: Gly, Pro;
[1089] (6) aromatic: Trp, Tyr, Phe.

[1090] Amino acid substitutions may be introduced into an antibody of interest and the products screened for a desired activity, e.g., retained/improved antigen binding, decreased immunogenicity, or improved ADCC or CDC. Conservative substitutions are known in the art and are preferred. Non-conservative substitutions will entail exchanging a member of one of these classes for another class.

[1091] Antibodies may also comprise modifications to glycan chains substituting certain residues such as Asn 297. For example, antibodies may be engineered or treated to be afucosylated to improve ADCC.

[1092] Antibodies comprising the CDRs, variable heavy and light chains disclosed herein may be made by methods known in the art.

[1093] For example, variable antibody domains may be cloned into IgG expression vectors (IgG conversion). PCR-amplified DNA fragments of heavy and light chain V-domains may be inserted in frame into, e.g., a human IgG1 constant heavy chain containing recipient mammalian expression vector. Antibody expression may be driven by an MPSV promoter and transcription terminated by a synthetic polyA signal sequence located downstream of the CDS.

[1094] Antibodies may be produced using recombinant methods and compositions. Nucleic acids encoding the antibodies described herein are provided. Such a nucleic acid may encode an amino acid sequence comprising the V_{L} and/or an amino acid sequence comprising the V_{H} of the antibody (e.g., the light and/or heavy chains of the antibody). Expression vectors comprising (i.e., transformed with) such nucleic acids are provided, as are host cells comprising such nucleic acids. In one such embodiment, a host cell comprises (1) a vector comprising a nucleic acid that encodes an amino acid sequence comprising the V_{L} and an amino acid sequence comprising the V_{H}, or (2) a first vector comprising a nucleic acid that encodes an amino acid sequence comprising the V_{L} of the antibody and a second vector comprising a nucleic acid that encodes an amino acid sequence comprising the V_{H} of the antibody.

[1095] The host cell may be eukaryotic, e.g. a Chinese Hamster Ovary (CHO) cell or lymphoid cell (e.g., Y0, NS0, Sp20 cell). Host cells comprising a nucleic acid encoding the antibody may be cultured under conditions suitable for expression, and the antibody recovered from the host cell or culture medium.

[1096] Suitable host cells for cloning or expression of antibody-encoding vectors include other prokaryotic or eukaryotic cells described herein. For example, antibodies may be produced in bacteria (e.g., E. coli), in particular when glycosylation and Fc effector function are not needed. In addition to prokaryotes, eukaryotic microbes such as filamentous fungi or yeast are suitable cloning or expression hosts for antibody-encoding vectors, including fungi and yeast strains whose glycosylation pathways have been “humanized,” resulting in the production of an antibody with a partially or fully human glycosylation pattern. Additional suitable host cells for the expression of glycosylated antibody are also derived from multicellular organisms (invertebrates and vertebrates). Examples of invertebrate cells include plant and insect cells. Numerous baculoviral strains have been identified which may be used in conjunction with insect cells, particularly for transfection of Spodoptera frugiperda cells. Plant cell cultures can also be utilized as hosts.

[1097] In some embodiments, an antibody provided herein has a dissociation constant (Kd) of <1 μM, <100 nM, <50 nM, <10 nM, <5 nM, <1 nM, <0.1 nM, <0.01 nM, or <0.001 nM, and optionally is >10⁻¹³ M. (e.g. 10⁻⁸ M or less, e.g. from 10⁻⁸ M to 10⁻¹³ M, e.g., from 10⁻⁹ M to 10⁻¹³ M). In one embodiment, Kd is measured by a radiolabeled antigen binding assay (RIA) performed with the Fab version of an antibody of interest and its antigen, or using a surface plasmon resonance assay, e.g., WO2015089344.

### Antibody-Drug Conjugates

[1098] Also provided herein are immunoconjugates comprising an antibody as disclosed herein, or an antigen-binding fragment thereof, conjugated to one or more drugs (e.g., cytotoxic agents such as chemotherapeutic agents, growth inhibitory agents, toxins, or radioactive isotopes). Immunoconjugates allow for the targeted delivery of a drug or other cytotoxic agent to a tumor, enhancing the therapeutic index by maximizing efficacy and minimizing off-target toxicity. Antibody-drug conjugates (ADCs) disclosed herein include those with anticancer activity. The antibody may be covalently attached to the drug moiety through a linker.

[1099] An exemplary embodiment of an ADC comprises: an antibody (Ab), or an antigen-binding fragment thereof, which targets a tumor cell, a cytotoxic moiety such as a drug (D), and a linker moiety (L) that attaches Ab to D. In some embodiments, the antibody is attached to the linker moiety (L) through one or more amino acid residues, such as lysine and/or cysteine.

[1100] An ADC may have Formula I:

Ab-(L-D)ₚ

wherein:
[1101] Ab is an antibody as disclosed herein, or an antigen-binding fragment thereof;
[1102] L is a linker;
[1103] D is a drug; and
[1104] p is about 1 to about 20.

[1105] The antibody (Ab) may comprise a polypeptide disclosed herein.

[1106] The drug moiety (D) of the ADC may include any compound, moiety or group that has a cytotoxic or cytostatic effect, or may be a diagnostic or detectable agent.

[1107] The linker (L) is a bifunctional or multifunctional moiety that has, e.g., reactive functionalities for attaching to the drug and to the antibody. A linker may have a functionality that is capable of reacting with a free cysteine present on an antibody to form a covalent bond, or a functionality that is capable of reacting with an electrophilic group present on an antibody. Linkers can be susceptible to cleavage (cleavable linker), such as, acid-induced cleavage, photo-induced cleavage, peptidase-induced cleavage, esterase-induced cleavage, and disulfide bond cleavage, at conditions under which the compound or the antibody remains active. Alternatively, linkers can be substantially resistant to cleavage (e.g., stable linker or noncleavable linker). In some aspects, the linker is a procharged linker, a hydrophilic linker, or a dicarboxylic acid based linker.

[1108] Examples of cleavable linkers include acid-labile linkers (e.g., comprising hydrazone), protease-sensitive (e.g., peptidase-sensitive) linkers, photolabile linkers, or disulfide-containing linkers. The linker may be, for example, any one of N-succinimidyl-4-(2-pyridyldithio)2-sulfo-butanoate (sulfo-SPDB), N-succinimidyl-3-(2-pyridyldithio)propionate (SPDP), N-succinimidyl 4-(2-pyridyldithio)pentanoate (SPP), N-succinimidyl 4-(2-pyridyldithio)butanoate (SPDB), N-succinimidyl iodoacetate (SIA), N-succimmidyl(4-iodoacetyl)aminobenzoate (SIAB), maleimide PEG NHS, N-succinimidyl 4-(maleimidomethyl)cyclohexanecarboxylate (SMCC), N-sulfosuccinimidyl 4-(maleimidomethyl)cyclohexanecarboxylate (sulfo-SMCC) and 2,5-dioxopyrrolidin-1-yl 17-(2,5-dioxo-2,5-dihydro-1H-pyrrol-1-yl)-5,8,11,14-tetraoxo-4,7,10,13-tetraazaheptadecan-1-oate (CXl-1).

[1109] The number of drug moieties (e.g., p) that can be conjugated to an antibody may be limited by the number of free cysteine residues (which may be naturally occurring or introduced into the antibody amino acid sequence, or generated using reducing conditions prior to conjugation). In some embodiments, p may be 1 to 10, 2 to 8, or 2 to 5. In some embodiments, p is 3 to 4.

[1110] In some embodiments, the drug moiety (D) may be chosen from an anti-cancer agent, anti-hematological disorder agent, an autoimmune treatment agent, an antiinflammatory agent, an antifungal agent, an antibacterial agent, an anti-parasitic agent, an anti-viral agent, an anesthetic agent, a cytotoxin, or a radiotoxin.

[1111] In some embodiments, D may be a maytansinoid, a V-ATPase inhibitor, a pro-apoptotic agent, a Bcl2 inhibitor, an MCL1 inhibitor, a HSP90 inhibitor, an IAP inhibitor, an mTor inhibitor, a microtubule stabilizer, a microtubule destabilizer, an auristatin, a dolastatin, a MetAP (methionine aminopeptidase), an inhibitor of nuclear export of proteins CRM1, a DPPIV inhibitor, proteasome inhibitors, inhibitors of phosphoryl transfer reactions in mitochondria, a protein synthesis inhibitor, a kinase inhibitor, a CDK2 inhibitor, a CDK9 inhibitor, a kinesin inhibitor, an HDAC inhibitor, a DNA damaging agent, a DNA alkylating agent, a DNA intercalator, a DNA minor groove binder and a DHFR inhibitor.

[1112] In some embodiments, the drug (D) may be an anticancer agent. Anti-cancer agents include, and D may be, for example:
[1113] 1) inhibitor or modulator of a protein involved in one or more of the DNA damage repair (DDR) pathways such as:
   [1114] a. PARP1/2, including, but not limited to: olaparib, niraparib, rucaparib;
   [1115] b. checkpoint kinase 1 (CHK1), including, but not limited to: UCN-01, AZD7762, PF477736, SCH900776, MK-8776, LY2603618, V158411, and EXEL-9844;
   [1116] c. checkpoint kinase 2 (CHK2), including, but not limited to: PV1019, NSC 109555, and VRX0466617;
   [1117] d. dual CHK1/CHK2, including, but not limited to: XL-844, AZD7762, and PF-473336;
   [1118] e. WEE1, including, but not limited to: MK-1775 and PD0166285;
   [1119] f. ATM, including, but not limited to KU-55933,
   [1120] g. DNA-dependent protein kinase, including, but not limited to NU7441 and M3814; and
   [1121] h. Additional proteins involved in DDR;
[1122] 2) an inhibitor or modulator of one or more immune checkpoints, including, but not limited to:
   [1123] a. a PD-1 inhibitor such as nivolumab (OPDIVO), pembrolizumab (KEYTRUDA), pidilizumab (CT-011), and AMP-224 (AMPLIMMUNE);
   [1124] b. a PD-L1 inhibitor such as Atezolizumab (TECENTRIQ), Avelumab (Bavencio), Durvalumab (Imfinzi), MPDL3280A (Tecentriq), BMS-936559, and MEDI4736;
   [1125] c. an anti-CTLA-4 antibodies such as ipilimumab (YERVOY) and CP-675,206 (TREMELIMUMAB);
   [1126] d. an inhibitor of T-cell immunoglobulin and mucin domain 3 (Tim-3);
   [1127] e. an inhibitor of V-domain Ig suppressor of T cell activation (Vista);
   [1128] f. an inhibitor of band T lymphocyte attenuator (BTLA);
   [1129] g. an inhibitor of lymphocyte activation gene 3 (LAG3); and
   [1130] h. an inhibitor of T cell immunoglobulin and immunoreceptor tyrosine-based inhibitory motif domain (TIGIT);
[1131] 3) a telomerase inhibitor or telomeric DNA binding compound;
[1132] 4) an alkylating agent, including, but not limited to: chlorambucil (LEUKERAN), oxaliplatin (ELOXATIN), streptozocin (ZANOSAR), dacarbazine, ifosfamide, lomustine (CCNU), procarbazine (MATULAN), temozolomide (TEMODAR), and thiotepa;
[1133] 5) a DNA crosslinking agent, including, but not limited to: carmustine, chlorambucil (LEUKERAN), carboplatin (PARAPLATIN), cisplatin (PLATIN), busulfan (MYLERAN), melphalan (ALKERAN), mitomycin (MITOSOL), and cyclophosphamide (ENDOXAN);
[1134] 6) an anti-metabolite, including, but not limited to: cladribine (LEUSTATIN), cytarbine, (ARA-C), mercaptopurine (PURINETHOL), thioguanine, pentostatin (NIPENT), cytosine arabinoside (cytarabine, ARA-C), gemcitabine (GEMZAR), fluorouracil (5-FU, CARAC), capecitabine (XELODA), leucovorin (FUSILEV), methotrexate (RHEUMATREX), and raltitrexed;
[1135] 7) an antimitotic, which are often plant alkaloids and terpenoids, or a derivative thereof including but limited to: a taxane such as docetaxel (TAXITERE), paclitaxel (ABRAXANE, TAXOL), a vinca alkaloid such as vincristine (ONCOVIN), vinblastine, vindesine, and vinorelbine (NAVELBINE);
[1136] 8) a topoisomerase inhibitor, including, but not limited to: amsacrine, camptothecin (CTP), genistein, irinotecan (CAMPTOSAR), topotecan (HYCAMTIN), doxorubicin (ADRIAMYCIN), daunorubicin (CERUBIDINE), epirubicin (ELLENCE), ICRF-193, teniposide (VUMON), mitoxantrone (NOVANTRONE), and etoposide (EPOSIN);
[1137] 9) a DNA replication inhibitor, including, but not limited to: fludarabine (FLUDARA), aphidicolin, ganciclovir, and cidofovir;
[1138] 10) a ribonucleoside diphosphate reductase inhibitor, including, but not limited to: hydroxyurea;
[1139] 11) a transcription inhibitor, including, but not limited to: actinomycin D (dactinomycin, COSMEGEN) and plicamycin (mithramycin);
[1140] 12) a DNA cleaving agent, including, but not limited to: bleomycin (BLENOXANE) and idarubicin;
[1141] 13) an aromatase inhibitor, including, but not limited to: aminoglutethimide, anastrozole (ARIMIDEX), letrozole (FEMARA), vorozole (RIVIZOR), and exemestane (AROMASIN);
[1142] 14) an angiogenesis inhibitor, including, but not limited to: genistein, sunitinib (SUTENT), and bevacizumab (AVASTIN);
[1143] 15) an anti-steroid or anti-androgen, including, but not limited to: aminoglutethimide (CYTADREN), bicalutamide (CASODEX), cyproterone, flutamide (EULEXIN), nilutamide (NILANDRON);
[1144] 16) a tyrosine kinase inhibitor, including, but not limited to: imatinib (GLEEVEC), erlotinib (TARCEVA), lapatininb (TYKERB), sorafenib (NEXAVAR), and axitinib (INLYTA);
[1145] 17) an mTOR inhibitor, including, but not limited to: everolimus, temsirolimus (TORISEL), and sirolimus;
[1146] 18) an apoptosis inducer such as cordycepin;
[1147] 19) a protein synthesis inhibitor, including, but not limited to: clindamycin, chloramphenicol, streptomycin, anisomycin, and cycloheximide;
[1148] 20) an antidiabetic, including, but not limited to: metformin and phenformin;
[1149] 21) a cytotoxic antibiotic, including, but not limited to:
   [1150] a. tetracyclines, including, but not limited to: doxycycline;
   [1151] b. erythromycins, including, but not limited to: azithromycin;
   [1152] c. glycylglycines, including, but not limited to: tigecyline;
   [1153] d. antiparasitics, including, but not limited to: pyrvinium pamoate;
   [1154] e. beta-lactams, including, but not limited to the penicillins and cephalosporins;
   [1155] f. an anthracycline antibiotic, including, but not limited to: doxorubicin, daunorubicin, epirubicin, idarubicin, pirarubicin, aclarubicin, and mitoxantrone;
   [1156] g. a bleomycin such as the classical bleomycin A2 (BLENOXANE) and pingyangmycin (also known as bleomycin A5)
   [1157] h. another antibiotic, including, but not limited to: chloramphenicol, mitomycin C and actinomycin D (dactinomycin, COSMEGEN); and
[1158] 22) another agent, such as Bacillus Calmette-Gudrin (B-C-G) vaccine; buserelin (ETILAMIDE); chloroquine (ARALEN); clodronate, pamidronate, or another bisphosphonate; colchicine; demethoxyviridin; dichloroacetate; estramustine; filgrastim (NEUPOGEN); fludrocortisone (FLORINEF); goserelin (ZOLADEX); interferon; leucovorin; leuprolide (LUPRON); levamisole; lonidamine; mesna; metformin; mitotane (o,p′-DDD, LYSODREN); nocodazole; octreotide (SANDOSTATIN); perifosine; porfimer (particularly in combination with photo- and radiotherapy); suramin; tamoxifen; titanocene dichloride; tretinoin; an anabolic steroid such as fluoxymesterone (HALOTESTIN); estrogens such as estradiol, diethylstilbestrol (DES), and dienestrol; a progestin such as medroxyprogesterone acetate (MPA) and megestrol; and testosterone.

[1159] In some embodiments, the drug moiety (D) may be a toxin. Plant-derived protein toxins include ribosome inactivating proteins (RIPs) such as shiga toxins, type I (e.g. trichosanthin and luffin) and type II (e.g. ricin, agglutinin, and abrin), as well as saporin, gelonin, and pokeweed antiviral protein; and bacterial toxins include Pseudomonas exotoxin and Diphtheria toxin.

[1160] In some embodiments, the drug moiety (D) may be a diagnostic or detectable agent. Such immunoconjugates can be useful for monitoring or prognosing the onset, development, progression and/or severity of a disease or disorder as part of a clinical testing procedure, such as determining the efficacy of a particular therapy. Such diagnosis and detection can be accomplished by coupling the antibody to detectable substances including, but not limited to, various enzymes, such as horseradish peroxidase, alkaline phosphatase, beta-galactosidase, or acetylcholinesterase; prosthetic groups, such as, but not limited to, streptavidinfoiotin and avidin/biotin; fluorescent materials, such as, but not limited to, Alexa Fluor 350, Alexa Fluor 405, Alexa Fluor 430, Alexa Fluor 488, Alexa Fluor 500, Alexa Fluor 514, Alexa Fluor 532, Alexa Fluor 546, Alexa Fluor 555, Alexa Fluor 568, Alexa Fluor 594, Alexa Fluor 610, Alexa Fluor 633, Alexa Fluor 647, Alexa Fluor 660, Alexa Fluor 680, Alexa Fluor 700, Alexa Fluor 750, umbelliferone, fluorescein, fluorescein isothiocyanate, rhodamine, dichlorotriazinylamine fluorescein, dansyl chloride or phycoerythrin; luminescent materials, such as, but not limited to, luminol; bioluminescent materials, such as but not limited to, luciferase, luciferin, and aequorin; radioactive materials, such as, but not limited to, iodine (¹³¹I, ¹²⁵I, ¹²³I, and ^{m}I), carbon (¹⁴C), sulfur (³⁵S), tritium, indium (¹¹⁵In, ¹¹³In, ¹¹²In, and ^{m}In), technetium (⁹⁹Tc), thallium (²⁰¹Ti), gallium (⁶⁸Ga, ⁶⁷Ga), palladium (¹⁰³Pd), molybdenum (⁹⁹Mo), xenon (¹³³Xe), fluorine (¹⁸F), ¹⁵³Sm, ¹⁷⁷Lu, ¹⁵⁹Gd, ¹⁴⁹Pm, ¹⁴⁰La, ¹⁷⁵Yb, ¹⁶⁶Ho, ⁹⁰Y, ⁴⁷Sc, ¹⁸⁶Re, ¹⁸⁸Re, ¹⁴²Pr, ¹⁰⁵Rh, ⁹⁷Ru, ⁶⁸Ge, ⁵⁷Co, ⁶⁵Zn, ⁸⁵Sr, ³²P, ¹⁵³Gd, ¹⁶⁹Yb, ⁵¹Cr, ⁵⁴Mn, ⁷⁵Se, ⁶⁴Cu, ¹¹³Sn, and ¹¹⁷Sn; and positron emitting metals using various positron emission tomographies, and nonradioactive paramagnetic metal ions.

[1161] In some embodiments the drug moiety D is chosen from saporin, MMAE, MMAF, DM1, DM4. In some embodiments, the drug is saporin.

### Treatment Applications

[1162] The polypeptides, including antibodies and functional antigen-binding fragments thereof, CAR-bearing immune effector cells, and compositions described herein, antibody-drug conjugates, and pharmaceutical compositions comprising them can be used in the treatment or prevention of progression of proliferative diseases such as cancers and myelodysplastic syndromes. The cancer may be a hematologic malignancy or solid tumor. Hematologic malignancies include leukemias, lymphomas, multiple myeloma, and subtypes thereof. Lymphomas can be classified various ways, often based on the underlying type of malignant cell, including Hodgkin's lymphoma (often cancers of Reed-Sternberg cells, but also sometimes originating in B cells; all other lymphomas are non-Hodgkin's lymphomas), non-Hodgkin's lymphomas, B-cell lymphomas, T-cell lymphomas, mantle cell lymphomas, Burkitt's lymphoma, follicular lymphoma, and others as defined herein and known in the art. Myelodysplastic syndromes comprise a group of diseases affecting immature leukocytes and/or hematopoietic stem cells (HSCs); MDS may progress to AML.

[1163] B-cell lymphomas include, but are not limited to, diffuse large B-cell lymphoma (DLBCL), chronic lymphocytic leukemia (CLL)/small lymphocytic lymphoma (SLL), and others as defined herein and known in the art.

[1164] T-cell lymphomas include T-cell acute lymphoblastic leukemia/lymphoma (T-ALL), peripheral T-cell lymphoma (PTCL), T-cell chronic lymphocytic leukemia (T-CLL), Sezary syndrome, and others as defined herein and known in the art.

[1165] Leukemias include acute myeloid (or myelogenous) leukemia (AML), chronic myeloid (or myelogenous) leukemia (CML), acute lymphocytic (or lymphoblastic) leukemia (ALL), chronic lymphocytic leukemia (CLL) hairy cell leukemia (sometimes classified as a lymphoma), and others as defined herein and known in the art.

[1166] Plasma cell malignancies include lymphoplasmacytic lymphoma, plasmacytoma, and multiple myeloma.

[1167] Solid tumors include melanomas, neuroblastomas, gliomas or carcinomas such as tumors of the brain, head and neck, breast, lung (e.g., non-small cell lung cancer, NSCLC), reproductive tract (e.g., ovary), upper digestive tract, pancreas, liver, renal system (e.g., kidneys), bladder, prostate and colorectum.

[1168] Methods described herein are generally performed on a subject in need thereof. A subject in need of the therapeutic methods described herein can be a subject having, diagnosed with, suspected of having, or at risk for developing, or at rick of progressing to a later stage of, cancer. A determination of the need for treatment will typically be assessed by a history, physical exam, or diagnostic tests consistent with the disease or condition at issue. Diagnosis of the various conditions treatable by the methods described herein is within the skill of the art. The subject can be an animal subject, including a mammal, such as horses, cows, dogs, cats, sheep, pigs, mice, rats, monkeys, hamsters, guinea pigs, and humans, or other animals such as chickens. For example, the subject can be a human subject.

[1169] Generally, a safe and effective amount of a therapy, e.g. an antibody or functional antigen-binding fragment thereof, CAR-bearing immune effector cell, or antibody-drug conjugate, is, for example, an amount that would cause the desired therapeutic effect in a subject while minimizing undesired side effects.

[1170] According to the methods described herein, administration can be parenteral, pulmonary, oral, topical, intradermal, intramuscular, intraperitoneal, intravenous, intratumoral, intrathecal, intracranial, intracerebroventricular, subcutaneous, intranasal, epidural, ophthalmic, buccal, or rectal administration. Where the product is, for example, a biologic or cell therapy, the mode of administration will likely be via injection or infusion.

[1171] Standards of Care and Conditioning Regimens for Immunotherapy

[1172] Standard of care treatment for cancers, such as AML, can involve anti-cancer pharmaceutical therapy including chemotherapy and targeted therapy, as well as hematopoietic stem cell transplant (HSCT).

[1173] For example, the combination of cytarabine (cytosine arabinoside or ara-C) and an anthracycline such as daunorubicin (daunomycin) or idarubicin is the first-line chemotherapy for AML. Other chemotherapeutics that may be used to treat AML include cladribine (Leustatin, 2-CdA), fludarabine (Fludara), mitoxantrone, Etoposide (VP-16), 6-thioguanine (6-TG), hydroxyurea, corticosteroids such as prednisone or dexamethasone, methotrexate (MTX), 6-mercaptopurine (6-MP), azacitidine (Vidaza), and decitabine (Dacogen). In addition, targeted therapies may be used in appropriate patients, such as midostaurin (Rydapt) or gilteritinib (Xospata) in patients with FLT-3 mutations; gemtuzumab ozogamicin (Mylotarg) in CD33-positive AML; BCL-2 inhibitor such as venetoclax (Venclexta); IDH inhibitors such as ivosidenib (Tibsovo) or enasidenib (Idhifa); and hedgehog pathway inhibitors such as glasdegib (Daurismo). Although the rate of complete remission can be as high as 80% following initial induction chemotherapy, the majority of AML patients will eventually progress to relapsed or refractory (RR) disease, and five-year survival rate are about 35% in people under 60 years old and 10% in people over 60 years old. See, Walter R B et al., “Resistance prediction in AML: analysis of 4601 patients from MRC/NCRI, HOVON/SAKK, SWOG and MD Anderson Cancer Center,” Leukemia 29(2):312-20 (2015) and Döhner, H et al., “Acute Myeloid Leukemia,” NEJM 373 (12): 1136-52 (2015).

[1174] Adoptive cell transfer (ACT) therapy is also possible in the treatment of cancers such as AML, either with or without a conditioning regimen. Currently, hematopoietic stem cell transfer (HSCT) is used; other therapies such as transplant of NK cells, chimeric antigen receptor (CAR) T cells (CAR-T) and other CAR-bearing immune effector cells are in development.

[1175] Hematopoietic Stem Cell Transplant (HSCT)

[1176] Hematopoietic stem cell transplantation (HSCT) is a potentially curative therapeutic approach for a variety of malignant and nonmalignant hematopoietic diseases, such as AML, CML, ALL, Hodgkin and non-Hodgkin lymphoma, multiple myeloma, myelodysplastic syndrome, neuroblastoma, Ewing sarcoma, gliomas, and solid tumors. HSCT for AML is typically allogeneic and requires HLA-matching between donor and patient for several reasons. The first is to prevent HvGD, but an additional benefit is the graft-versus-leukemia (GvL) effect wherein donor immune cells recognize patient leukemia cells as being foreign to them and attack them. In some cases, for example where the patient may not be able to tolerate an allogeneic transplant, an autologous transplant may be used, often after careful purging to attempt to remove leukemia cells.

[1177] Typically, when HSCT is performed in patients with malignant disorders, preparative or conditioning regimens are administered as part of the procedure to effect immunoablation to prevent graft rejection, and to reduce tumor burden. Traditionally, these goals have been achieved by using otherwise supralethal doses of total body irradiation (TBI) and chemotherapeutic agents with nonoverlapping toxicities, so-called “high-intensity” pre-HSCT conditioning. However, as it was recognized that immunologic reactions of donor cells against malignant host cells (i.e., graft-versus-tumor effects) substantially contributed to the effectiveness of HSCT, reduced-intensity and nonmyeloablative conditioning regimens have been developed, making HCT applicable to older and medically infirm patients.

[1178] Conditioning regimens are known in the art. See, e.g., Gyurkocza and Sandmaier B M, “Conditioning regimens for hematopoietic cell transplantation: one size does not fit all,” Blood 124(3): 344-353 (2014). Conditioning regimens may be classified as high-dose (myeloablative), reduced-intensity, and nonmyeloablative, following the Reduced-Intensity Conditioning Regimen Workshop, convened by the Center for International Blood and Marrow Transplant Research (CIBMTR) during the Bone Marrow Transplantation Tandem Meeting in 2006.

[1179] Immunotherapy with CAR-Bearing Immune Effector Cells

[1180] CAR-bearing immune effector cells have been used in treatment of AML with varying results. Clinical trials with CAR-T cells targeting AML antigens such as CD33 and CD123 have been registered and are proceeding, but have not to date seen unequivocal success. One problem is the difficulty in targeting a suitable targetable surface antigen that is not also expressed on healthy cells. CAR-engineered cells from the immortalized NK-92 cell line targeting AML antigen CD33 have also been tested.

[1181] There are multiple scenarios where therapy with CAR-bearing immune effector cells would be useful in AML. In one scenario where a patient with AML is treated with CAR cell therapy, the CAR present on the surface of the CAR-bearing immune effector cell recognizes and binds to an AML cell antigen, such as CD33, FLT-3, or CLL-1, and the AML cell is targeted for killing. The CAR cell therapy will also target the same antigens on the patient's own hematopoietic stem cells. Thereafter, the patient receives hematopoietic stem cell transplant (HSCT), optionally undergoing preliminary procedures to extinguish the CAR cells and condition the patient for HSCT beforehand, and the engrafted donor stem cells then attack the remaining AML cells. Although this is an effective therapy for many patients, AML may nevertheless relapse (e.g. in about 50% of cases), and further treatment with the same CAR cell therapy is typically not feasible because the engrafted stem cells and their progeny will recognize the newly-infused CAR cells as foreign and destroy them.

[1182] Polymorphic Targeting of Cancer Antigens

[1183] Polymorphic Targeting. Another approach to the use of CAR-bearing immune effector cells in the treatment of AML exploits natural variation in AML target antigen polymorphism to solve this problem. Certain AML antigens, such as CD33, FLT-3, and CLL-1 occur as polymorphic variants. For example, in a given population, an AML antigen exists as two predominant polymorphs, e.g. A, in which a given base pair in the genomic sequence of the antigen is A-T, and B, in which the base pair is C-G at the same position. This will lead to a different amino acid residue being translated, and provided that the base pair occurs in a coding region, an antigen with a different amino acid residue and thus a different primary and, thus, tertiary structure. If the change is significant, and the residue is in an solvent-exposed position on the cell surface that is accessible to an antibody, an antigen-binding fragment thereof, or a synthetic antigen-binding protein such as an scFv, then a CAR may be designed to bind a single polymorph selectively over the other(s). And a CAR-T cell, or other immune effector cell, bearing such a selective CAR, can target and kill AML cells of a single polymorphic form. See, e.g., Table 2 below, setting forth three AML antigens and their common polymorphisms:

TABLE 2
Polymorphisms in AML Antigens

| POLYMORPHISM | A | BB |
|---|---|---|
| CD33 | Arg 64.3% | Gly 35.7% |
| ARG69GLY (R69G) | | |
| FLT3 | Thr 40.1% | Met 59.9% |
| THR227MET (T227M) | | |
| CLL1 | Lys 26.3% | Gln 73.7% |
| LYS244GLN (K244Q) | | |

See also FIG. 1 showing the positions of the CD33 extracellular domain with amino acid 69 in the left panel, and FLT3 ECD AA267 in the right panel, each in a relatively solvent-accessible position.

[1184] Patient-Donor Mismatch. When the patient has one polymorphic form of an AML antigen, and a donor of cells for use in HSCT has another polymorphic form of the antigen, creating a “mismatch” of AML antigen polymorphisms, several useful treatment scenarios arise.

[1185] When the donor provides polymorphically “mismatched” stem cells for HSCT, and those cells are engrafted into a recipient patient, CAR-bearing immune effector cell therapy with a CAR selective for the patient's polymorphic variant may be used—even after HSCT transplant—to target and kill any remaining cells bearing the patient's polymorphic form of the antigen. Because the cells selectively target the patient's polymorphism, the donor's engrafted cells will be spared. Treatment may be either prophylactic, or upon signs of relapsing disease. Thus, relapse is prevented or treated, and the patient can achieve disease-free survival.

[1186] The HSC and the T cells or other immune effector cells that will be engineered to express a CAR may both come from the same donor, polymorphically mismatched to the intended recipient. As shown below in Table 3, the donor must be homozygous for either one polymorphism or the other (i.e., cannot be heterozygous), and the receiving patient can be either homozygous for the other polymorphism or heterozygous.

TABLE 3
Treatment Options with Anti-CD33
Polymorphic Antibodies and CARs

| | Donor Genotype | | |
|---|---|---|---|
| Rs2455069 | AA | AG | |
| A > G Arg69Gly | (ARG/ARG) | (ARG/GLY) | GG(GLY/GLY) |
| AA(ARG/ARG) | — | — | CAR-A |
| AG (ARG/GLY) | CAR-G | — | CAR-A |
| GG (GLY/GLY) | CAR-G | — | — |

[1187] In another variation, the HSC may come from one mismatched donor, and the immune effector cells that will be engineered to express a CAR will come from a different donor. If the CAR-bearing immune effector cells are CAR-T cells, these cells may have the T-cell receptor disabled, e.g., by genetic disruption of one or more of its components (such as TRAC), e.g., using CRISPR or another genome editing tool, or a technology such as PEBL.

### Pharmaceutical Compositions

[1188] Also disclosed is a pharmaceutical composition comprising a disclosed molecule in a pharmaceutically acceptable carrier. Pharmaceutical carriers are known to those skilled in the art. These most typically would be standard carriers for administration of drugs to humans, including solutions such as sterile water, saline, and buffered solutions at physiological pH. Typically, an appropriate amount of a pharmaceutically-acceptable salt is used in the formulation to render the formulation isotonic. Examples of the pharmaceutically-acceptable carrier include, but are not limited to, saline, Ringer's solution and dextrose solution. The pH of the solution is preferably from about 5 to about 8, and more preferably from about 7 to about 7.5. The solution should be RNAse free. Further carriers include sustained release preparations such as semipermeable matrices of solid hydrophobic polymers containing the antibody, which matrices are in the form of shaped articles, e.g., films, liposomes or microparticles. It will be apparent to those persons skilled in the art that certain carriers may be more preferable depending upon, for instance, the route of administration and concentration of composition being administered.

[1189] Pharmaceutical compositions may include carriers, thickeners, diluents, buffers, preservatives, surface active agents and the like in addition to the molecule of choice. Pharmaceutical compositions may also include one or more active ingredients such as antimicrobial agents, anti-inflammatory agents, anesthetics, and the like.

[1190] Preparations for parenteral administration include sterile aqueous or non-aqueous solutions, suspensions, and emulsions. Examples of non-aqueous solvents are propylene glycol, polyethylene glycol, vegetable oils such as olive oil, and injectable organic esters such as ethyl oleate. Aqueous carriers include water, alcoholic/aqueous solutions, emulsions or suspensions, including saline and buffered media. Parenteral vehicles include sodium chloride solution, Ringer's dextrose, dextrose and sodium chloride, lactated Ringer's, or fixed oils. Intravenous vehicles include fluid and nutrient replenishers, electrolyte replenishers (such as those based on Ringer's dextrose), and the like. Preservatives and other additives may also be present such as, for example, antimicrobials, anti-oxidants, chelating agents, and inert gases and the like.

### Definitions

[1191] Unless otherwise defined, scientific and technical terms used in connection with the present disclosure shall have the meanings that are commonly understood by those of ordinary skill in the art. Further, unless otherwise required by context, singular terms shall include pluralities and plural terms shall include the singular. Generally, nomenclatures utilized in connection with, and techniques of, cell and tissue culture, molecular biology, and protein and oligo or polynucleotide chemistry and hybridization described herein are those well-known and commonly used in the art.

[1192] The terms “polypeptide,” “peptide” and “protein” are used interchangeably herein to refer to a polymer of amino acid residues. The terms also apply to amino acid polymers in which one or more amino acid residue is an artificial chemical mimetic of a corresponding naturally occurring amino acid, as well as to naturally occurring amino acid polymers and non-naturally occurring amino acid polymer.

[1193] As used herein, the term “antibody” refers to a polypeptide that includes canonical immunoglobulin sequence elements sufficient to confer specific binding, or e.g. immune-reacts and/or is directed to a particular target antigen. As is known in the art, intact antibodies as produced in nature are approximately 150 kD tetrameric agents comprised of two identical heavy chain polypeptides (about 50 kD each) and two identical light chain polypeptides (about 25 kD each) that associate with each other into what is commonly referred to as a “Y-shaped” structure. Each heavy chain is comprised of at least four domains (each about 110 amino acids long)—an amino-terminal variable (V_{H}) domain, followed by three constant domains: C_{H}1, C_{H}2, and the carboxy-terminal C_{H}3. A short region, known as the “switch”, connects the heavy chain variable and constant regions. The “hinge” connects C_{H}2 and C_{H}3 domains to the rest of the antibody. Two disulfide bonds in this hinge region connect the two heavy chain polypeptides to one another in an intact antibody. Each light chain is comprised of two domains—an amino-terminal variable (V_{L}) domain, followed by a carboxy-terminal constant (C_{L}) domain, separated from one another by another “switch”. Intact antibody tetramers are comprised of two heavy chain-light chain dimers in which the heavy and light chains are linked to one another by a single disulfide bond; two other disulfide bonds connect the heavy chain hinge regions to one another, so that the dimers are connected to one another and the tetramer is formed. Naturally-produced antibodies are also glycosylated, typically on the C_{H}2 domain. Each domain in a natural antibody has a structure characterized by an “immunoglobulin fold” formed from two beta sheets (e.g., 3-, 4-, or 5-stranded sheets) packed against each other in a compressed antiparallel beta barrel. Each variable domain contains three hypervariable loops known as “Complementarity-Determining Regions” (CDR1, CDR2, and CDR3) and four somewhat invariant “framework” regions (FR1, FR2, FR3, and FR4). When natural antibodies fold, the FR regions form the beta sheets that provide the structural framework for the domains, and the CDR loop regions from both the heavy and light chains are brought together in three-dimensional space so that they create a single hypervariable antigen binding site located at the tip of the Y structure. The Fc region of naturally-occurring antibodies binds to elements of the complement system, and also to receptors on effector cells, including for example effector cells that mediate cytotoxicity.

[1194] The term “antigen” refers to a molecular entity that may be soluble or cell membrane bound in particular but not restricted to molecular entities that can be recognized by means of the adaptive immune system including but not restricted to antibodies or TCRs, or engineered molecules including but not restricted to transgenic TCRs, chimeric antigen receptors (CARs), scFvs or multimers thereof, Fab-fragments or multimers thereof, antibodies or multimers thereof, single chain antibodies or multimers thereof, or any other molecule that can execute binding to a structure with high affinity.

[1195] The terms “specifically binds” or “specific for” or “specifically recognize” with respect to an antigen-recognizing receptor refer to an antigen-binding domain of said antigen-recognizing receptor which recognizes and binds to a specific polymorphic variant of an antigen, but does not substantially recognize or bind other variants.

[1196] The term “monoclonal antibody” (mAb), as applied to the antibodies described in the present disclosure, are compounds derived from a single copy or a clone from any eukaryotic, prokaryotic, or phage clone, and not the method by which it is produced. mAbs of the present disclosure may exist in a homogeneous or substantially homogeneous population.

[1197] As used herein, the term “binding affinity” refers to the strength of binding of one molecule to another at a site on the molecule. If a particular molecule will bind to or specifically associate with another particular molecule, these two molecules are said to exhibit binding affinity for each other. Binding affinity is related to the association constant and dissociation constant for a pair of molecules, but it is not critical to the methods herein that these constants be measured or determined. Rather, affinities as used herein to describe interactions between molecules of the described methods are generally apparent affinities (unless otherwise specified) observed in empirical studies, which can be used to compare the relative strength with which one molecule (e.g., an antibody or other specific binding partner) will bind two other molecules (e.g., two versions or variants of a peptide). The concepts of binding affinity, association constant, and dissociation constant are well known.

[1198] As used herein, the term “sequence identity” means the percentage of identical nucleotide or amino acid residues at corresponding positions in two or more sequences when the sequences are aligned to maximize sequence matching, i.e., taking into account gaps and insertions. Identity can be readily calculated by known methods. Methods to determine identity are designed to give the largest match between the sequences tested. Moreover, methods to determine identity are codified in publicly available computer programs. Optimal alignment of sequences for comparison can be conducted, for example, by the local homology algorithm of Smith & Waterman, by the homology alignment algorithms, by the search for similarity method or, by computerized implementations of these algorithms (GAP, BESTFIT, PASTA, and TFASTA in the GCG Wisconsin Package, available from Accelrys, Inc. See generally, Altschul, S. F. et al., J. Mol. Biol. 215: 403-410 (1990) and Altschul et al. Nucl. Acids Res. 25: 3389-3402 (1997). One example of an algorithm that is suitable for determining percent sequence identity and sequence similarity is the BLAST algorithm,

[1199] An “antibody fragment” refers to a molecule other than an intact antibody that comprises a portion of an intact antibody that binds the antigen to which the intact antibody binds. Several examples of antibody fragments include but are not limited to Fv, Fab, Fab′, Fab′-SH, F(ab′)₂, diabodies, linear antibodies, single chain variable fragments (scFvs), and multi-specific antibodies formed from antibody fragments. In some embodiments, the antibody fragment is an antigen-binding fragment.

[1200] Reviews of current methods for antibody engineering and improvement can be found in R. Kontermann and S. Dubel, (2010) Antibody Engineering Vols. 1 and 2, Springer Protocols, 2^{nd} Edition and W. Strohl and L. Strohl (2012) Therapeutic antibody engineering: Current and future advances driving the strongest growth area in the pharmaceutical industry, Woodhead Publishing. Methods for producing and purifying antibodies and antigen-binding fragments are well known in the art and can be found, in Harlow and Lane (1988) Antibodies: A Laboratory Manual, Cold Spring Harbor Laboratory Press, Cold Spring Harbor, NY, chapters 5-8 and 15.

[1201] A “diseased cell” refers to the state of a cell, tissue or organism that diverges from the normal or healthy state and may result from the influence of a pathogen, a toxic substance, irradiation, or cell internal deregulation. A “diseased cell” may also refer to a cell that has been infected with a pathogenic virus. Further the term “diseased cell” may refer to a malignant cell or neoplastic cell that may constitute or give rise to cancer in an individual.

[1202] The term “cancer” is known medically as a malignant neoplasm. Cancer is a broad group of diseases involving upregulated cell growth. In cancer, cells (cancerous cells) divide and grow uncontrollably, forming malignant tumors, and invading nearby parts of the body. The cancer may also spread to more distant parts of the body through the lymphatic system or bloodstream. There are over 200 different known cancers that affect humans.

[1203] The term “malignant” or “malignancy” describes cells, groups of cells or tissues that constitute a neoplasm, are derived from a neoplasm or can be the origin of new neoplastic cells. The term is used to describe neoplastic cells in contrast to normal or healthy cells of a tissue. A malignant tumor contrasts with a non-cancerous benign tumor in that a malignancy is not self-limited in its growth, is capable of invading into adjacent tissues, and may be capable of spreading to distant tissues. A benign tumor has none of those properties. Malignancy is characterized by anaplasia, invasiveness, and metastasis as well as genome instability. The term “premalignant cells” refer to cells or tissue that is not yet malignant but is poised to become malignant.

[1204] The term “chemotherapy” refers to the treatment of cancer (cancerous cells) with one or more cytotoxic anti-neoplastic drugs (“chemotherapeutic agents” or “chemotherapeutic drugs”) as part of a standardized regimen. Chemotherapy may be given with a curative intent or it may aim to prolong life or to palliate symptoms. It is often used in conjunction with other cancer treatments, such as radiation therapy, surgery, and/or hyperthermia therapy. Traditional chemotherapeutic agents act by killing cells that divide rapidly, one of the main properties of most cancer cells. This means that chemotherapy also harms cells that divide rapidly under normal circumstances, such as cells in the bone marrow, digestive tract, and hair follicles. This results in the most common side-effects of chemotherapy, such as myelosuppression (decreased production of blood cells, hence also immunosuppression), mucositis (inflammation of the lining of the digestive tract), and alopecia (hair loss).

[1205] The term “immune cell” or “immune effector cell” refers to a cell that may be part of the immune system and executes a particular effector function such as alpha-beta T cells, NK cells (including ML-NKs and CIML-NKs), NKT cells (including iNKT cells), B cells, innate lymphoid cells (ILC), cytokine induced killer (CIK) cells, lymphokine activated killer (LAK) cells, gamma-delta T cells, mesenchymal stem cells or mesenchymal stromal cells (MSC), monocytes and macrophages. Preferred immune cells are cells with cytotoxic effector function such as alpha-beta T cells, NK cells (including ML-NKs and CIML-NKs), NKT cells (including iNKT cells), ILC, CIK cells, LAK cells or gamma-delta T cells. “Effector function” means a specialized function of a cell, e.g. in a T cell an effector function may be cytolytic activity or helper activity including the secretion of cytokines.

[1206] The term “side-effects” refers to any complication, unwanted or pathological outcome of an immunotherapy with an antigen recognizing receptor that occurs in addition to the desired treatment outcome. The term “side effect” preferentially refers to on-target off-tumor toxicity, that might occur during immunotherapy in case of presence of the target antigen on a cell that is an antigen-expressing non-target cell but not a diseased cell as described herein. A side-effect of an immunotherapy may be the developing of graft versus host disease.

[1207] The term “reducing side-effects” refers to the decrease of severity of any complication, unwanted or pathological outcome of an immunotherapy with an antigen recognizing receptor such as toxicity towards an antigen-expressing non-target cell. “Reducing side-effects” also refers to measures that decrease or avoid pain, harm or the risk of death for the patient during the immunotherapy with an antigen recognizing receptor.

[1208] The term “combination immunotherapy” refers to the concerted application of two therapy approaches e.g. therapy approaches known in the art for the treatment of disease such as cancer. The term “combination immunotherapy” may also refer to the concerted application of an immunotherapy such as the treatment with an antigen recognizing receptor and another therapy such as the transplantation of hematopoietic cells e.g. hematopoietic cells resistant to recognition by the antigen recognizing receptor. Expression of an antigen on a cell means that the antigen is sufficient present on the cell surface of said cell, so that it can be detected, bound and/or recognized by an antigen-recognizing receptor.

[1209] The term “hematopoietic cells”, refers to a population of cells of the hematopoietic lineage capable of hematopoiesis which include but is not limited to hematopoietic stem cells and/or hematopoietic progenitor cells (i.e., capable to proliferate and at least partially reconstitute different blood cell types, including erythroid cells, lymphocytes, and myelocytes). The term “hematopoietic cells” as used herein also includes the cells that are differentiated from the hematopoietic stem cells and/or hematopoietic progenitor cells to form blood cells (i.e. blood cell types, including erythroid cells, lymphocytes, and myelocytes).

[1210] A donor hematopoietic cell resistant to recognition of an antigen by an antigen-recognizing receptor means that said cell cannot as easily be detected, bound and/or recognized by an antigen-recognizing receptor specific for said antigen or that the detection, binding and/or recognizing is impaired, so the cell is not killed during immunotherapy.

[1211] The term “fratricide” refers to the observation that the antigen associated with disease may be, in addition to diseased cells, present on immune effector cells engineered, such as T cells expressing an antigen-recognizing receptor, such as a CAR. In that case the side-effects of the antigen recognizing receptor will affect the immune effector cells engineered to express the antigen recognizing receptor. Such side-effect is also known in the art as fratricide.

[1212] In general, the term “receptor” refers to a biomolecule that may be soluble or attached to the cell surface membrane and specifically binds a defined structure that may be attached to a cell surface membrane or soluble. Receptors include but are not restricted to antibodies and antibody like structures, adhesion molecules, transgenic or naturally occurring TCRs or CARs. In specific, the term “antigen-recognizing receptor” as used herein may be a membrane bound or soluble receptor such as a natural TCR, a transgenic TCR, a CAR, a scFv or multimers thereof, a Fab-fragment or multimers thereof, an antibody or multimers thereof, a bi-specific T cell enhancer (BiTE), a diabody, or any other molecule that can execute specific binding with high affinity.

[1213] The term “target” or “target antigen” refers to any cell surface protein, glycoprotein, glycolipid or any other structure present on the surface of the target cell. The term also refers to any other structure present on target cells in particular but not restricted to structures that can be recognized by means of the adaptive immune system including but not restricted to antibodies or TCRs, or engineered molecules including but not restricted to transgenic TCRs, CARs, scFvs or multimers thereof, Fab-fragments or multimers thereof, antibodies or multimers thereof, single chain antibodies or multimers thereof, or any other molecule that can execute binding to a structure with high affinity.

[1214] The term “target cells” as used herein refers to cells which are recognized by the antigen-recognizing receptor which is or will be applied to the individual.

[1215] The term “system for use in immunotherapy” as used herein refers to the constellation that two kinds of compositions are needed to perform the combined immunotherapy as disclosed herein. Therefore, the system (or set or kit or the combination of compositions) comprises a) an antigen-recognizing receptor wherein said antigen-recognizing receptor specifically recognizes an antigen on target cells in said individual; b) hematopoietic cells resistant to recognition of said antigen by said antigen-recognizing receptor.

[1216] “Chimeric antigen receptor” or “CAR” refer to engineered receptors, which graft an antigen specificity onto cells, for example T cells. The CARs disclosed herein comprise an antigen binding domain also known as antigen targeting region, an extracellular spacer domain or hinge region, a transmembrane domain and at least one intracellular signaling domain or at least one co-stimulatory domain and at least one intracellular signaling domain.

[1217] In general, a CAR may comprise an extracellular domain (extracellular part) comprising the antigen binding domain, a transmembrane domain and an intracellular signaling domain. The extracellular domain may be linked to the transmembrane domain by a linker. The extracellular domain may also comprise a signal peptide.

[1218] A “signal peptide” refers to a peptide sequence that directs the transport and localization of the protein within a cell, e.g. to a certain cell organelle (such as the endoplasmic reticulum) and/or the cell surface.

[1219] An “antigen binding domain” refers to the region of the CAR that specifically binds to an antigen (and thereby is able to target a cell containing an antigen). CARs may comprise one or more antigen binding domains. Generally, the targeting regions on the CAR are extracellular. The antigen binding domain may comprise an antibody or an antigen-binding fragment thereof. The antigen binding domain may comprise, for example, full length heavy chain, Fab fragments, single chain Fv (scFv) fragments, divalent single chain antibodies or diabodies. Any molecule that binds specifically to a given antigen such as affibodies or ligand binding domains from naturally occurring receptors may be used as an antigen binding domain. Often the antigen binding domain is a scFv. Normally, in a scFv the variable portions of an immunoglobulin heavy chain and light chain are fused by a flexible linker to form a scFv. Such a linker may be for example the (GGGG₄S)₃. In some instances, it is beneficial for the antigen binding domain to be derived from the same species in which the CAR will be used in. For example, when it is planned to use it therapeutically in humans, it may be beneficial for the antigen binding domain of the CAR to comprise a human or humanized antibody or antigen-binding fragment thereof. Human or humanized antibodies or fragments thereof can be made by a variety of methods well known in the art.

[1220] “Spacer” or “hinge” as used herein refers to the hydrophilic region which is between the antigen binding domain and the transmembrane domain. The CARs disclosed herein may comprise an extracellular spacer domain but is it also possible to pass such a spacer. The spacer may include Fc fragments of antibodies or fragments thereof, hinge regions of antibodies or fragments thereof, CH2 or CH3 regions of antibodies, accessory proteins, artificial spacer sequences or combinations thereof. A prominent example of a spacer is the CD8alpha hinge.

[1221] The “transmembrane domain” of the CAR can be derived from any desired natural or synthetic source for such domain. When the source is natural the domain may be derived from any membrane-bound or transmembrane protein. The transmembrane domain may be derived for example from CD8alpha or CD28. When the key signaling and antigen recognition modules are on two (or even more) polypeptides then the CAR may have two (or more) transmembrane domains. Splitting key signaling and antigen recognition modules enables for a small molecule-dependent, titratable and reversible control over CAR cell expression (Wu et al, 2015, Science 350: 293-303) due to small molecule-dependent heterodimerizing domains in each polypeptide of the CAR.

[1222] The cytoplasmic domain or the intracellular signaling domain of the CAR is responsible for activation of at least one of the normal effector functions of the immune cell in which the CAR is expressed. “Effector function” means a specialized function of a cell, e.g. in a T cell an effector function may be cytolytic activity or helper activity including the secretion of cytokines. The intracellular signaling domain refers to the part of a protein which transduces the effector function signal and directs the cell expressing the CAR to perform a specialized function.

[1223] The intracellular signaling domain may include any complete or truncated part of the intracellular signaling domain of a given protein sufficient to transduce the effector function signal. Prominent examples of intracellular signaling domains for use in the CARs include the cytoplasmic sequences of the T cell receptor (TCR) and co-receptors that act in concert to initiate signal transduction following antigen receptor engagement.

[1224] Generally, T cell activation can be mediated by two distinct classes of cytoplasmic signaling sequences, firstly those that initiate antigen-dependent primary activation through the TCR (primary cytoplasmic signaling sequences) and secondly those that act in an antigen-independent manner to provide a secondary or co-stimulatory signal (secondary cytoplasmic signaling sequences, costimulatory signaling domain). Therefore, an intracellular signaling domain of a CAR may comprise a primary cytoplasmic signaling domain and/or a secondary cytoplasmic signaling domain.

[1225] Primary cytoplasmic signaling sequences that act in a stimulatory manner may contain ITAMs (immunoreceptor tyrosine-based activation motifs signaling motifs). Examples of ITAM containing primary cytoplasmic signaling sequences often used in CARs are that are those derived from TCR zeta (CD3 zeta), FcR gamma, FcR beta, CD3 gamma, CD3 delta, CD3 epsilon, CD5, CD22, CD79a, CD79b, and CD66d. Most prominent is sequence derived from CD3 zeta.

[1226] The cytoplasmic domain of the CAR can be designed to comprise the CD3-zeta signaling domain by itself or combined with any other desired cytoplasmic domain(s). The cytoplasmic domain of the CAR can comprise a CD3 zeta chain portion and a costimulatory signaling region. The costimulatory signaling region refers to a part of the CAR comprising the intracellular domain of a costimulatory molecule. A costimulatory molecule is a cell surface molecule other than an antigen receptor or their ligands that is required for an efficient response of lymphocytes to an antigen. Examples for a costimulatory molecule are CD27, CD28, 4-1BB (CD137), OX40, CD30, CD40, PD-1, ICOS, lymphocyte function-associated antigen-1 (LFA-1), CD2, CD7, LIGHT, NKG2C, B7-H3. The cytoplasmic signaling sequences within the cytoplasmic signaling part of the CAR may be linked to each other in a random or specified order. A short oligo- or polypeptide linker, which is preferably between 2 and 10 amino acids in length, may form the linkage. A prominent linker is the glycine-serine doublet.

[1227] As an example, the cytoplasmic domain may comprise the signaling domain of CD3-zeta and the signaling domain of CD28. In another example the cytoplasmic domain may comprise the signaling domain of CD3-zeta and the signaling domain of CD27. In an further example, the cytoplasmic domain may comprise the signaling domain of CD3-zeta, the signaling domain of CD28, and the signaling domain of CD27.

[1228] As aforementioned either the extracellular part or the transmembrane domain or the cytoplasmic domain of a CAR may also comprise a heterodimerizing domain for the aim of splitting key signaling and antigen recognition modules of the CAR.

[1229] A CAR may be designed to comprise any portion or part of the above-mentioned domains as described herein in any combination resulting in a functional CAR.

[1230] A “chimeric antigen receptor” has at least an antigen-specific variable region (typically a single chain variable region comprised of antibody heavy and light chain variable regions) linked to an effector cell signaling domain: typically an intracellular domain of a T-cell receptor, exemplified by (but not limited to) the zeta domain of CD3. Upon binding of the antigen-specific region to the corresponding antigen, the signaling domain mediates an effector cell function in the host cell (such as cytotoxicity). The CAR may optionally but does not necessarily comprise additional domains, such as a linker, a transmembrane domain, and other intracellular signaling elements as described above.

[1231] The term “genetic modification” or genetically modified” refers to the alteration of the nucleic acid content including but not restricted to the genomic DNA of a cell. This includes but is not restricted to the alteration of a cells genomic DNA sequence by introduction exchange or deletion of single nucleotides or fragments of nucleic acid sequence. The term also refers to any introduction of nucleic acid into a cell independent of whether that leads to a direct or indirect alteration of the cells genomic DNA sequence or not.

[1232] The terms “engineered cell” and “genetically modified cell” as used herein can be used interchangeably. The terms mean containing and/or expressing a foreign gene or nucleic acid sequence, which in turn modifies the genotype or phenotype of the cell or its progeny. Especially, the terms refer to the fact that cells can be manipulated by recombinant methods well known in the art to express stably or transiently peptides or proteins, which are not expressed in these cells in the natural state. Genetic modification of cells may include but is not restricted to transfection, electroporation, nucleofection, transduction using retroviral vectors, lentiviral vectors, non-integrating retro- or lentiviral vectors, transposons, designer nucleases including zinc finger nucleases, TALENs or CRISPR/Cas.

[1233] The term “therapeutic effective amount” means an amount, which provides a therapeutic benefit.

[1234] Immunotherapy is a medical term defined as the “treatment of disease by inducing, enhancing, or suppressing an immune response” Immunotherapies designed to elicit or amplify an immune response are classified as activation immunotherapies, while immunotherapies that reduce or suppress are classified as suppression immunotherapies. Cancer immunotherapy as an activating immunotherapy attempts to stimulate the immune system to reject and destroy tumors. Adoptive cell transfer uses cell-based cytotoxic responses to attack cancer cells Immune cells such as T cells that have a natural or genetically engineered reactivity to a patient's cancer are generated in vitro and then transferred back into the cancer patient.

[1235] As used herein, the term “transplant” means administering to a subject a population of donor cells, e.g. hematopoietic cells or CAR-bearing immune effector cells.

[1236] The term “treatment” as used herein means to reduce the frequency or severity of at least one sign or symptom of a disease.

[1237] As used herein, the term “individual” refers to an animal. Preferentially, the individual is a mammal such as mouse, rat, cow, pig, goat, chicken dog, monkey or human. More preferentially, the individual is a human. The individual may be an individual suffering from a disease such as cancer (a patient), but the subject may be also a healthy subject.

[1238] As used herein, the term “fold selective,” means having an affinity for one target (e.g., a first polymorphic variant of an antigen) that is at least x-fold greater than its affinity for another target (e.g., a second polymorphic variant of an antigen), wherein x is at least 2, and may be higher, e.g., 10, 20, 50, 100, or 1000. In preferred embodiments, the fold selectivity is therapeutically meaningful, i.e., sufficient to permit cells expressing one target to be killed and cells bearing the other target to be killed.

### EXAMPLES

### Example 1: Identification of Targets for Polymorphically Selective Polypeptides

[1239] Polymorphically selective polypeptides may be identified for antigen targets which, optimally, 1) have a targetable portion in in extracellular domain 2) that is solvent-exposed and accessible to binding by a polymorphically selective polypeptide such as an scFv, 3) has a high population frequency so that donor patient mismatch is possible, and 4) has a high antigen density on target cells.

[1240] For example, CD33 ARG69GLY has a high population frequency, with a minor allele frequency (MAF) of 0.42. Similarly, CLL-1 LYS244GLN has a MAF of 0.35, and FLT3 THR227MET has a MAF of 0.40.

### Example 2: Identification of Anti-Human CD33 scFv Clones

[1241] Selective anti-human-CD33 scFv clones were discovered by standard screening methodologies of a human antibody library using two recombinant polymorphic forms of human CD33 extracellular domain antigens (CD33^{R69} and CD33^{G69}). Various panning tactics were employed to encourage enrichment of thermostable clones of a desired affinity range. The scFvs were screened for selective binding between two single nucleotide polymorphism (SNP) variants of human CD33 (Arginine 69 and Glycine 69) by flow cytometry and bio-layer interferometry (BLI), for example as described below in Examples 5 and 6. Selected sequences are disclosed below in Polypeptides 1-42.

[1242] Additional anti-human-CD33 polypeptides may be identified using these methods.

TABLE 4a
Sequences of Anti-CD33 R69-Selective Polypeptides (CDR Sequences)

| Poly- | | SEQ | | SEQ | | SEQ | | SEQ | | SEQ | | SEQ |
|---|---|---|---|---|---|---|---|---|---|---|---|---|
| peptide | | ID | | ID | | ID | | ID | | ID | | ID |
| No. | HCDR1 | NO | HCDR2 | NO | HCDR3 | NO | LCDR1 | NO | LCDR2 | NO | LCDR3 | NO |
| 1 | YSFTGYYIH | 1 | GWINP | 26 | CARDQ | 51 | RASQTI | 76 | SASTLH | 101 | CQQAY | 126 |
| | | | NSGGT | | WDGYN | | NDWLA | | S | | STPWTF | |
| | | | NYA | | SGYFD | | | | | | | |
| | | | | | YW | | | | | | | |
| 2 | FTFSDYYMS | 2 | SGISGS | 27 | CARTFG | 52 | RASQSI | 77 | TASTLQ | 102 | CQQYD | 127 |
| | | | GYSTY | | RGPDW | | SRYLN | | S | | DLPLTF | |
| | | | YA | | YFDLW | | | | | | | |
| 3 | FTFSNSDMN | 3 | SAISGS | 28 | CARGR | 53 | RASQSI | 78 | GASTL | 103 | CQQSY | 128 |
| | | | GGSTY | | EDDYG | | SSYLN | | HS | | RIPYTF | |
| | | | YA | | DYVFD | | | | | | | |
| | | | | | YW | | | | | | | |
| 4 | GTFSSYAIS | 4 | GWINP | 29 | CAREH | 54 | RASQNI | 79 | GASTR | 104 | CQQYD | 129 |
| | | | NSGNT | | GDMDV | | NSDLA | | AT | | SLPFTF | |
| | | | GYA | | W | | | | | | | |
| 5 | NTFTSYGIS | 5 | GWINP | 30 | CARES | 55 | RSSQSL | 80 | LGSDR | 105 | CMQGL | 130 |
| | | | NSGGT | | WFGEL | | LHSNG | | AS | | QTPITF | |
| | | | KYA | | YYGMD | | YNYLD | | | | | |
| | | | | | VW | | | | | | | |
| 6 | YTFTAYYTH | 6 | GWMNP | 31 | CAREA | 56 | RASQSI | 81 | EASTLE | 106 | CQQAN | 131 |
| | | | NSGHTS | | YDSFD | | SSYLN | | T | | SFPFTF | |
| | | | YA | | YW | | | | | | | |
| 7 | YTFTDYYM | 7 | GWINP | 32 | CARDS | 57 | RASRGI | 82 | GASSLQ | 107 | CQQSY | 132 |
| | H | | NSGGT | | RIAVAA | | NNWLT | | S | | RIPYTF | |
| | | | NYA | | SSFDY | | | | | | | |
| | | | | | W | | | | | | | |
| 8 | FTFSSYAMS | 8 | SDISGS | 33 | CARPGS | 58 | RASQS | 83 | AASSLQ | 108 | CQQSY | 133 |
| | | | GSGTY | | DGEFD | | VSSFLN | | S | | TTPLTF | |
| | | | YA | | YW | | | | | | | |
| 9 | GTFSSDAIN | 9 | GGFDPE | 34 | CARGPS | 59 | RSSRNI | 84 | KASSLE | 109 | CQQAIS | 134 |
| | | | DGETIY | | GYDFEF | | SHWLA | | S | | FPLTF | |
| | | | A | | DYW | | | | | | | |
| 10 | DTFTTYAIS | 10 | GWINP | 35 | CAREGI | 60 | KSSQSV | 85 | WASTR | 110 | CQQYF | 135 |
| | | | NSGVA | | VGATD | | LHSSKN | | ES | | TTPPTF | |
| | | | TYA | | AFDIW | | KNYLA | | | | | |
| 11 | DTFTNHYM | 11 | GWINP | 36 | CARDL | 61 | RASQSL | 86 | AASSLQ | 111 | CQQAN | 136 |
| | H | | NSGGT | | VPAAV | | GSWLA | | S | | SFPLTF | |
| | | | NYA | | GGYFD | | | | | | | |
| | | | | | YW | | | | | | | |
| 12 | FTFSSHWMS | 12 | SAISGS | 37 | CARDD | 62 | QASQDI | 87 | DASNL | 112 | CQQSY | 137 |
| | | | GGSTY | | NSGSQ | | DNYLN | | ET | | STPLTF | |
| | | | YA | | ADW | | | | | | | |
| 13 | YSFTGYYM | 13 | GWINP | 38 | CVKDR | 63 | RASQGI | 88 | AASSLQ | 113 | CQQSY | 138 |
| | H | | NSGGT | | GDRVV | | RNWLA | | S | | RTPYTF | |
| | | | YFA | | TSYLDY | | | | | | | |
| | | | | | W | | | | | | | |
| 14 | YTFTGYYM | 14 | GIINPS | 39 | CARAA | 64 | KSSQSV | 89 | WASTR | 114 | CQQYY | 139 |
| | H | | GGSTSY | | PYYYD | | LYSSNN | | ES | | TTPLTF | |
| | | | A | | SSGYYS | | KNYLA | | | | | |
| | | | | | GGYYF | | | | | | | |
| | | | | | DYW | | | | | | | |
| 15 | FTFSIYEIH | 15 | SAISGS | 40 | CARSY | 65 | RSSQSL | 90 | LASNR | 115 | CKQTS | 140 |
| | | | GGSTY | | CGGDC | | LHSNG | | AS | | HIPLTF | |
| | | | YA | | WDYYY | | YNYLD | | | | | |
| | | | | | YYGMD | | | | | | | |
| | | | | | VW | | | | | | | |
| 16 | FTFSDNSMN | 16 | SYISSS | 41 | CARGR | 66 | RSSQSL | 91 | SASNLQ | 116 | CMQAL | 141 |
| | | | GSTIYY | | ASSWP | | LHSNG | | S | | QTPPTF | |
| | | | A | | NWFDP | | YNYLD | | | | | |
| | | | | | W | | | | | | | |
| 17 | FTFSSYAMS | 17 | SGISYD | 42 | CAREW | 67 | RASQGI | 92 | ESSTLE | 117 | CQQSY | 142 |
| | | | SDKIGY | | EGFDY | | SNNLN | | T | | SAPLTF | |
| | | | A | | W | | | | | | | |
| 18 | YTFTDHYM | 18 | GWINP | 43 | CAKDK | 68 | RSSQSL | 93 | LGSNR | 118 | CMQTL | 143 |
| | H | | NSGGT | | FGDEGS | | LHSNG | | AS | | RTPLTF | |
| | | | NYA | | GWYGD | | YNYLD | | | | | |
| | | | | | FQHW | | | | | | | |
| 19 | FTFSSYWM | 19 | SGFSGS | 44 | CAREW | 69 | RASQNI | 94 | DAKDL | 119 | CQQAN | 144 |
| | H | | ARTYY | | SGFDY | | GPWLA | | HP | | TFPMTF | |
| | | | A | | W | | | | | | | |
| 20 | YMFTGYYIH | 20 | GWINP | 45 | CAKDR | 70 | RASQSI | 95 | GASSLQ | 120 | CQQSY | 145 |
| | | | NSGGT | | FGSGN | | DRWLA | | S | | STPWTF | |
| | | | NYA | | YGYMD | | | | | | | |
| | | | | | VW | | | | | | | |
| 21 | FTFSSYAMS | 21 | SAISGS | 46 | CARELS | 71 | QASQDI | 96 | AASGL | 121 | CQQAN | 146 |
| | | | GGSTY | | HDYGG | | SNNLN | | QS | | SFPLTF | |
| | | | YA | | NSDFD | | | | | | | |
| | | | | | YW | | | | | | | |
| 22 | YTFTDYYIH | 22 | GWINP | 47 | CARDH | 72 | RASRSI | 97 | AASSLQ | 122 | CQQSY | 147 |
| | | | NSGGT | | RIAVAG | | RTWLA | | T | | STPYTF | |
| | | | NYA | | SYFDY | | | | | | | |
| | | | | | W | | | | | | | |
| 23 | YPFTAHYIH | 23 | GWINP | 48 | CARDV | 73 | RASQGI | 98 | DASNL | 123 | CQQAN | 148 |
| | | | NSGGT | | EMATIG | | NNWLA | | ET | | SFPPTF | |
| | | | NYA | | AYWYF | | | | | | | |
| | | | | | DLW | | | | | | | |
| 24 | YSFTSYGIS | 24 | GWISA | 49 | CARAR | 74 | RSSQSL | 99 | DATNL | 124 | CMQAL | 149 |
| | | | YNGNT | | GAGTFF | | LHSNG | | PT | | QTPFTF | |
| | | | NYG | | DYW | | YNYLD | | | | | |
| 25 | YTFTGYYM | 25 | GRINPN | 50 | CARDD | 75 | RASQSI | 100 | AASN | 125 | CQQGY | 150 |
| | H | | GGSTT | | FYYYY | | NDWLA | | LOS | | STPPTF | |
| | | | YA | | LDFW | | | | | | | |

TABLE 4b
Sequences of Anti-CD33 R69-Selective Polypeptides (VH and VL Sequences)

| Polypep- | | SEQ | | SEQ |
|---|---|---|---|---|
| tide No. | Full VH | ID NO | Full VL | ID NO |
| 1 | QVQLVQSGAEVKKPGASVKVS | 151 | DIQMTQSPSSLSASVGDRVTITC | 176 |
| | CKASGYSFTGYYIHWVRQAPG | | RASQTINDWLAWYQQKPGKAP | |
| | QGLEWMGWINPNSGGTNYAQ | | KLLIYSASTLHSGVPSRFSGSGSG | |
| | KFQGRVTMTRDTSTSTVYMEL | | TDFTLTISSLQPEDFATYYCQQA | |
| | SSLRSEDTAVYYCARDQWDGY | | YSTPWTFGQGTKVEIKR | |
| | NSGYFDYWGQGTLVTVSS | | | |
| 2 | EVQLLESGGGLVQPGGSLRLSC | 152 | DIQMTQSPSSLSASVGDRVTITC | 177 |
| | AASGFTFSDYYMSWVRQAPGK | | RASQSISRYLNWYQQKPGKAPK | |
| | GLEWVSGISGSGYSTYYADSV | | LLIYTASTLQSGVPSRFSGSGSGT | |
| | KGRFTISRDNSKNTLYLQMNSL | | DFTLTISSLQPEDFATYYCQQYD | |
| | RAEDTAVYYCARTFGRGPDW | | DLPLTFGGGTKVEIKR | |
| | YFDLWGRGTLVTVSS | | | |
| 3 | EVQLLESGGGLVQPGGSLRLSC | 153 | DIQMTQSPSSLSASVGDRVTITC | 178 |
| | AASGFTFSNSDMNWVRQAPGK | | RASQSISSYLNWYQQKPGKAPK | |
| | GLEWVSAISGSGGSTYYADSV | | LLIYGASTLHSGVPSRFSGSGSGT | |
| | KGRFTISRDNSKNTLYLQMNSL | | DFTLTISSLQPEDFATYYCQQSY | |
| | RAEDTAVYYCARGREDDYGD | | RIPYTFGQGTKLEIKR | |
| | YVFDYWGQGTLVTVSS | | | |
| 4 | QVQLVQSGAEVKKPGASVKVS | 154 | EIVMTQSPATLSVSPGERATLSC | 179 |
| | CKASGGTFSSYAISWVRQAPG | | RASQNINSDLAWYQQKPGQAPR | |
| | QGLEWMGWINPNSGNTGYAQ | | LLIYGASTRATGIPARFSGSGSGT | |
| | KFQGRVTMTRDTSTSTVYMEL | | EFTLTISSLQSEDFAVYYCQQYD | |
| | SSLRSEDTAVYYCAREHGDMD | | SLPFTFGPGTKVDIKR | |
| | VWGQGTTVTVSS | | | |
| 5 | QVQLVQSGAEVKKPGASVKVS | 155 | DIVMTQSPLSLPVTPGEPASISCR | 180 |
| | CKASGNTFTSYGISWVRQAPG | | SSQSLLHSNGYNYLDWYLQKPG | |
| | QGLEWMGWINPNSGGTKYAQ | | QSPQLLIYLGSDRASGVPDRESG | |
| | KFQGRVTMTRDTSTSTVYMEL | | SGSGTDFTLKISRVEAEDVGVYY | |
| | SSLRSEDTAVYYCARESWFGE | | CMQGLQTPITFGQGTRLEIKR | |
| | LYYGMDVWGKGTTVTVSS | | | |
| 6 | QVQLVQSGAEVKKPGASVKVS | 156 | DIQMTQSPSSLSASVGDRVTITC | 181 |
| | CKASGYTFTAYYTHWVRQAP | | RASQSISSYLNWYQQKPGKAPK | |
| | GQGLEWMGWMNPNSGHTSYA | | LLIYEASTLETGVPSRFSGSGSGT | |
| | QKFQGRVTMTRDTSTSTVYME | | DFTLTISSLQPEDFATYYCQQAN | |
| | LSSLRSEDTAVYYCAREAYDSF | | SFPFTFGPGTKVDIKR | |
| | DYWGQGTLVTVSS | | | |
| 7 | QVQLVQSGAEVKKPGASVKVS | 157 | DIQMTQSPSSLSASVGDRVTITC | 182 |
| | CKASGYTFTDYYMHWVRQAP | | RASRGINNWLTWYQQKPGKAP | |
| | GQGLEWMGWINPNSGGTNYA | | KLLIYGASSLQSGVPSRFSGSGSG | |
| | QKFQGRVTMTRDTSTSTVYME | | TDFTLTISSLQPEDFATYYCQQS | |
| | LSSLRSEDTAVYYCARDSRIAV | | YRIPYTFGQGTKLEIKR | |
| | AASSFDYWGQGTLVTVSS | | | |
| 8 | EVQLLESGGGLVQPGGSLRLSC | 158 | DIQMTQSPSSLSASVGDRVTITC | 183 |
| | AASGFTFSSYAMSWVRQAPGK | | RASQSVSSFLNWYQQKPGKAPK | |
| | GLEWVSDISGSGSGTYYADAV | | LLIYAASSLQSGVPSRFSGSGSGT | |
| | KGRFTISRDNSKNTLYLQMNSL | | DFTLTISSLQPEDFATYYCQQSY | |
| | RAEDTAVYYCARPGSDGEFDY | | TTPLTFGQGTKVEIKR | |
| | WGQGTLVTVSS | | | |
| 9 | QVQLVQSGAEVKKPGSSVKVS | 159 | DIQMTQSPSSLSASVGDRVTITC | 184 |
| | CKASGGTFSSDAINWVRQAPG | | RSSRNISHWLA WYQQKPGKAPK | |
| | QGLEWMGGFDPEDGETIYAQK | | LLIYKASSLESGVPSRFSGSGSGT | |
| | FQGRVTITADESTSTAYMELSS | | DFTLTISSLQPEDFATYYCQQAIS | |
| | LRSEDTAVYYCARGPSGYDFE | | FPLTFGGGTKVEIKR | |
| | FDYWGQGTLVTVSS | | | |
| 10 | QVQLVQSGAEVKKPGASVKVS | 160 | DIVMTQSPDSLAVSLGERATINC | 185 |
| | CKASGDTFTTYAISWVRQAPG | | KSSQSVLHSSKNKNYLAWYQQK | |
| | QGLEWMGWINPNSGVATYAN | | PGQPPKLLIYWASTRESGVPDRF | |
| | KFQGRVTMTRDTSTSTVYMEL | | SGSGSGTDFTLTISSLQAEDVAV | |
| | SSLRSEDTAVYYCAREGIVGAT | | YYCQQYFTTPPTFGPGTKVDIKR | |
| | DAFDIWGQGTMVTVSS | | | |
| 11 | QVQLVQSGAEVKKPGASVKVS | 161 | DIQMTQSPSSLSASVGDRVTITC | 186 |
| | CKASGDTFTNHYMHWVRQAP | | RASQSLGSWLAWYQQKPGKAP | |
| | GQGLEWMGWINPNSGGTNYA | | KLLIYAASSLQSGVPSRFSGSGSG | |
| | QKFQGRVTMTRDTSTSTVYME | | TDFTLTISSLQPEDFATYYCQQA | |
| | LSSLRSEDTAVYYCARDLVPA | | NSFPLTFGQGTKVEIKR | |
| | AVGGYFDYWGQGTLVTVSS | | | |
| 12 | EVQLLESGGGLVQPGGSLRLSC | 162 | DIQMTQSPSSLSASVGDRVTITC | 187 |
| | AASGFTFSSHWMSWVRQAPG | | QASQDIDNYLNWYQQKPGKAP | |
| | KGLEWVSAISGSGGSTYYADS | | KLLIYDASNLETGVPSRFSGSGS | |
| | VKGRFTISRDNSKNTLYLQMN | | GTDFTLTISSLQPEDFATYYCQQ | |
| | SLRAEDTAVYYCARDDNSGSQ | | SYSTPLTFGGGTKLEIKR | |
| | ADWGQGTLVTVSS | | | |
| 13 | QVQLVQSGAEVKKPGASVKVS | 163 | DIQMTQSPSSLSASVGDRVTITC | 188 |
| | CKASGYSFTGYYMHWVRQAP | | RASQGIRNWLAWYQQKPGKAP | |
| | GQGLEWMGWINPNSGGTYFA | | KLLIYAASSLQSGVPSRFSGSGSG | |
| | QNFQGRVTMTRDTSTSTVYME | | TDFTLTISSLQPEDFATYYCQQS | |
| | LSSLRSEDTAVYYCVKDRGDR | | YRTPYTFGQGTKLEIKR | |
| | VVTSYLDYWGQGTLVTVSS | | | |
| 14 | QVQLVQSGAEVKKPGASVKVS | 164 | DIVMTQSPDSLAVSLGERATINC | 189 |
| | CKASGYTFTGYYMHWVRQAP | | KSSQSVLYSSNNKNYLAWYQQK | |
| | GQGLEWMGIINPSGGSTSYAQ | | PGQPPKLLIYWASTRESGVPDRF | |
| | KFQGRVTMTRDTSTSTVYMEL | | SGSGSGTDFTLTISSLQAEDVAV | |
| | SSLRSEDTAVYYCARAAPYYY | | YYCQQYYTTPLTFGQGTKLEIKR | |
| | DSSGYYSGGYYFDYWGQGTL | | | |
| | VTVSS | | | |
| 15 | EVQLLESGGGLVQPGGSLRLSC | 165 | DIVMTQSPLSLPVTPGEPASISCR | 190 |
| | AASGFTFSIYEIHWVRQAPGKG | | SSQSLLHSNGYNYLDWYLQKPG | |
| | LEWVSAISGSGGSTYYADSVK | | QSPQLLIYLASNRASGVPDRFSG | |
| | GRFTISRDNSKNTLYLQMNSLR | | SGSGTDFTLKISRVEAEDVGVYY | |
| | AEDTAVYYCARSYCGGDCWD | | CKQTSHIPLTFGQGTKVEIKR | |
| | YYYYYGMDVWGQGTTVTVSS | | | |
| 16 | EVOLVESGGGLVKPGGSLRLS | 166 | DIVMTQSPLSLPVTPGEPASISCR | 191 |
| | CAASGFTFSDNSMNWVRQAPG | | SSQSLLHSNGYNYLDWYLQKPG | |
| | KGLEWVSYISSSGSTIYYADSV | | QSPQLLIYSASNLQSGVPDRFSGS | |
| | KGRFTISRDDSKNTLYLQMNSL | | GSGTDFTLKISRVEAEDVGVYYC | |
| | KTEDTAVYYCARGRASSWPN | | MQALQTPPTFGQGTKLEIKR | |
| | WFDPWGQGTLVTVSS | | | |
| 17 | EVQLLESGGGLVQPGGSLRLSC | 167 | DIQMTQSPSSLSASVGDRVTITC | 192 |
| | AASGFTFSSYAMSWVRQAPGK | | RASQGISNNLNWYQQKPGKAPK | |
| | GLEWVSGISYDSDKIGYADAV | | LLIYESSTLETGVPSRFSGSGSGT | |
| | KGRFTISRDNSKNTLYLQMNSL | | DFTLTISSLQPEDFATYYCQQSYS | |
| | RAEDTAVYYCAREWEGFDYW | | APLTFGGGTKVEIKR | |
| | GQGTLVTVSS | | | |
| 18 | QVQLVQSGAEVKKPGASVKVS | 168 | DIVMTQSPLSLPVTPGEPASISCR | 193 |
| | CKASGYTFTDHYMHWVRQAP | | SSQSLLHSNGYNYLDWYLQKPG | |
| | GQGLEWMGWINPNSGGTNYA | | QSPQLLIYLGSNRASGVPDRFSG | |
| | QKFQGRVTMTRDTSTSTVYME | | SGSGTDFTLKISRVEAEDVGVYY | |
| | LSSLRSEDTAVYYCAKDKFGD | | CMQTLRTPLTFGGGTKVEIKR | |
| | EGSGWYGDFQHWGQGTLVTV | | | |
| | SS | | | |
| 19 | EVQLLESGGGLVQPGGSLRLSC | 169 | DIQMTQSPSSLSASVGDRVTITC | 194 |
| | AASGFTFSSYWMHWVRQAPG | | RASQNIGPWLAWYQQKPGKAP | |
| | KGLEWVSGFSGSARTYYADSV | | KLLIYDAKDLHPGVPSRFSGSGS | |
| | KGRFTISRDNSKNTLYLQMNSL | | GTDFTLTISSLQPEDFATYYCQQ | |
| | RAEDTAVYYCAREWSGFDYW | | ANTFPMTFGQGTRLEIKR | |
| | GQGTLVTVSS | | | |
| 20 | QVQLVQSGAEVKKPGASVKVS | 170 | DIQMTQSPSSLSASVGDRVTITC | 195 |
| | CKASGYMFTGYYIHWVRQAP | | RASQSIDRWLAWYQQKPGKAPK | |
| | GQGLEWMGWINPNSGGTNYA | | LLIYGASSLQSGVPSRFSGSGSGT | |
| | QKFQGRVTMTRDTSTSTVYME | | DFTLTISSLQPEDFATYYCQQSYS | |
| | LSSLRSEDTAVYYCAKDRFGS | | TPWTFGQGTRLEIKR | |
| | GNYGYMDVWGKGTTVTVSS | | | |
| 21 | EVQLLESGGGLVQPGGSLRLSC | 171 | DIQMTQSPSSLSASVGDRVTITC | 196 |
| | AASGFTFSSYAMSWVRQAPGK | | QASQDISNNLNWYQQKPGKAPK | |
| | GLEWVSAISGSGGSTYYADSV | | LLIYAASGLQSGVPSRFSGSGSG | |
| | KGRFTISRDNSKNTLYLQMNSL | | TDFTLTISSLQPEDFATYYCQQA | |
| | RAEDTAVYYCARELSHDYGGN | | NSFPLTFGGGTKVEIKR | |
| | SDFDYWGQGTLVTVSS | | | |
| 22 | QVQLVQSGAEVKKPGASVKVS | 172 | DIQMTQSPSSLSASVGDRVTITC | 197 |
| | CKASGYTFTDYYIHWVRQAPG | | RASRSIRTWLAWYQQKPGKAPK | |
| | QGLEWMGWINPNSGGTNYAQ | | LLIYAASSLQTGVPSRFSGSGSGT | |
| | EFQGRVTMTRDTSTSTVYMEL | | DFTLTISSLQPEDFATYYCQQSYS | |
| | SSLRSEDTAVYYCARDHRIAV | | TPYTFGQGTKLEIKR | |
| | AGSYFDYWGQGTLVTVSS | | | |
| 23 | QVQLVQSGAEVKKPGASVKVS | 173 | DIQMTQSPSSLSASVGDRVTITC | 198 |
| | CKASGYPFTAHYIHWVRQAPG | | RASQGINNWLAWYQQKPGKAP | |
| | QGLEWMGWINPNSGGTNYAQ | | KLLIYDASNLETGVPSRFSGSGS | |
| | KFQGRVTMTRDTSTSTVYMEL | | GTDFTLTISSLQPEDFATYYCQQ | |
| | SSLRSEDTAVYYCARDVEMAT | | ANSFPPTFGQGTKLEIKR | |
| | IGAYWYFDLWGRGTLVTVSS | | | |
| 24 | QVQLVQSGAEVKKPGSSVKVS | 174 | DIVMTQSPLSLPVTPGEPASISCR | 199 |
| | CKASGYSFTSYGISWVRQAPG | | SSQSLLHSNGYNYLDWYLQKPG | |
| | QGLEWLGWISAYNGNTNYGQ | | QSPQLLIYDATNLPTGVPDRFSG | |
| | SLQGRVTITADESTSTAYMELS | | SGSGTDFTLKISRVEAEDVGVYY | |
| | SLRSEDTAVYYCARARGAGTF | | CMQALQTPFTFGQGTKLEIKR | |
| | FDYWGQGTLVTVSS | | | |
| 25 | QVQLVQSGAEVKKPGASVKVS | 175 | DIQMTQSPSSLSASVGDRVTITC | 200 |
| | CKASGYTFTGYYMHWVRQAP | | RASQSINDWLAWYQQKPGKAP | |
| | GQGLEWMGRINPNGGSTTYAQ | | KLLIYAASNLQSGVPSRFSGSGS | |
| | KFQGRVTMTRDTSTSTVYMEL | | GTDFTLTISSLQPEDFATYYCQQ | |
| | SSLRSEDTAVYYCARDDFYYY | | GYSTPPTFGQGTKVEIKR | |
| | YLDFWGKGTTVTVSS | | | |

TABLE 5a
Sequences of Anti-CD33 R69G-Selective Polypeptides (CDR Sequences)

| Poly- | | SEQ | | SEQ | | SEQ | | SEQ | | SEQ | | SEQ |
|---|---|---|---|---|---|---|---|---|---|---|---|---|
| peptide | | ID | | ID | | ID | | ID | | ID | | ID |
| No. | HCDR1 | NO | HCDR2 | NO | HCDR3 | NO | LCDR1 | NO | LCDR2 | NO | LCDR3 | NO |
| 26 | YTFTEN | 201 | GWMN | 218 | CAREG | 235 | QASQDI | 252 | AASSLQ | 269 | CQQTSS | 286 |
| | EMH | | PNSGN | | GDWPY | | RNYLN | | S | | TPLTF | |
| | | | TGYA | | YYMDV | | | | | | | |
| | | | | | W | | | | | | | |
| 27 | YTLTG | 202 | GWMN | 219 | CARASS | 236 | RASQDI | 253 | GASSLQ | 270 | CQQTYS | 287 |
| | YYMH | | PSSGNT | | DRYYY | | RNNLG | | S | | SPPTF | |
| | | | GYA | | DGVWY | | | | | | | |
| | | | | | FDLW | | | | | | | |
| 28 | FTFSTY | 203 | SAISGS | 220 | CARDG | 237 | RASQGI | 254 | QASTLE | 271 | CQQSYS | 288 |
| | AMH | | GGSTY | | YGDYPF | | DNYLA | | S | | IPWTF | |
| | | | YA | | DYW | | | | | | | |
| 29 | YTFTG | 204 | GVINV | 221 | CARVS | 238 | RASQSI | 255 | DASNLE | 272 | CQQGN | 289 |
| | YYLH | | RRGST | | GSYYQP | | SRWLA | | T | | SFPPIF | |
| | | | RYA | | W | | | | | | | |
| 30 | YTFSN | 205 | GWMN | 222 | CVRDG | 239 | RASQSI | 256 | GASSLQ | 273 | CQQTY | 290 |
| | YYMH | | PDSGT | | TMVQGI | | SSWLA | | S | | RTPLTF | |
| | | | TGYA | | FDYW | | | | | | | |
| 31 | GTFSTY | 206 | GGIIPIV | 223 | CARSG | 240 | RASQGI | 257 | GASSVQ | 274 | CQQSYS | 291 |
| | AIT | | GRANY | | GHDLD | | GNDLG | | S | | TPITF | |
| | | | A | | YW | | | | | | | |
| 32 | FTFSSY | 207 | SSISGS | 224 | CARDN | 241 | RASQSV | 258 | ATSTRA | 275 | CQQYG | 292 |
| | GMH | | GDTTY | | PYGDY | | SSSYLA | | T | | SLPLTF | |
| | | | YA | | GGSFDY | | | | | | | |
| | | | | | W | | | | | | | |
| 33 | YTFTSY | 208 | GIIDPS | 225 | CARDY | 242 | RASQGI | 259 | DASNLE | 276 | CQQAN | 293 |
| | YMH | | GGSTN | | YGSGSY | | SNNLN | | T | | SFPLTF | |
| | | | YA | | YGLDY | | | | | | | |
| | | | | | W | | | | | | | |
| 34 | YTFTD | 209 | GIINPS | 226 | CARVD | 243 | RASQGI | 260 | AASTLQ | 277 | CQQSYS | 294 |
| | YYMH | | GGSTR | | GRRWL | | RNDLA | | N | | TPWTF | |
| | | | YA | | QSDYW | | | | | | | |
| 35 | YTFTD | 210 | GIINPS | 227 | CARVD | 244 | RASQGI | 261 | AASTLQ | 278 | CQQSYS | 295 |
| | YYMH | | GGSTR | | GRRWL | | RNDLA | | N | | TPWTF | |
| | | | YA | | RSDYW | | | | | | | |
| 36 | GTFSSY | 211 | GIISPS | 228 | CARTD | 245 | QASQGI | 262 | AASTLQ | 279 | CQQSY | 296 |
| | AIS | | GRSAG | | YGGHK | | NNYLN | | R | | QTPLTF | |
| | | | YG | | WYFDL | | | | | | | |
| | | | | | W | | | | | | | |
| 37 | YTFTG | 212 | GVISPS | 229 | CARAG | 246 | RASQSI | 263 | AASSLQ | 280 | CQQSYS | 297 |
| | YYLH | | GGGTS | | FGEGVF | | SSYLN | | S | | TPLTF | |
| | | | YA | | RHW | | | | | | | |
| 38 | YSFTSH | 213 | GWIKP | 230 | CARGS | 247 | RASQGI | 264 | TASTLQ | 281 | CQQSYS | 298 |
| | AIS | | NSGDT | | DDYYG | | SNYLA | | S | | TPLTF | |
| | | | KYA | | SYYFDY | | | | | | | |
| | | | | | W | | | | | | | |
| 39 | FTFRNY | 214 | SAISGS | 231 | CARVK | 248 | RASQGI | 265 | GASNLE | 282 | CQQAN | 299 |
| | GMG | | GGSTY | | FYGMD | | SNDLA | | T | | SFPFTF | |
| | | | YA | | VW | | | | | | | |
| 40 | YTFTD | 215 | GWMSP | 232 | CARAD | 249 | RVSQGI | 266 | EASTLE | 283 | CQQGY | 300 |
| | YHMH | | NSGNT | | YYGSD | | SSYLN | | S | | STPPTF | |
| | | | GYA | | YVKFD | | | | | | | |
| | | | | | YW | | | | | | | |
| 41 | YTFPN | 216 | GWINP | 233 | CARDR | 250 | RSSQSL | 267 | LGSNRA | 284 | CMQST | 301 |
| | YGIS | | NSGGT | | DILTGY | | LQSNG | | S | | HWPLTF | |
| | | | KYA | | YHFDY | | YNYLD | | | | | |
| | | | | | W | | | | | | | |
| 42 | YTFTD | 217 | GWINP | 234 | CARLN | 251 | RASQGI | 268 | AASSLQ | 285 | CQQSYS | 302 |
| | YFMH | | NSGNT | | DYGDY | | SNNLN | | S | | TPPTF | |
| | | | GYA | | GGPATL | | | | | | | |
| | | | | | DYW | | | | | | | |

TABLE 5b
Sequences of Anti-CD33 R69G-Selective Polypeptides (VH and
VL Sequences)

| Polypep- | | SEQ ID | | SEQ ID |
|---|---|---|---|---|
| tide No. | Full VH | NO | Full VL | NO |
| 26 | QVQLVQSGAEVKKPGASVKV | 303 | DIQMTQSPSSLSASVGDRVTI | 320 |
| | SCKASGYTFTENEMHWVRQA | | TCQASQDIRNYLNWYQQKPG | |
| | PGQGLEWMGWMNPNSGNTG | | KAPKLLIYAASSLQSGVPSRF | |
| | YAQKFQGRVTMTRDTSTSTV | | SGSGSGTDFTLTISSLQPEDFA | |
| | YMELSSLRSEDTAVYYCAREG | | TYYCQQTSSTPLTFGPGTKVD | |
| | GDWPYYYMDVWGKGTTVTV | | IKR | |
| | SS | | | |
| 27 | QVQLVQSGAEVKKPGASVKV | 304 | DIQMTQSPSSLSASVGDRVTI | 321 |
| | SCKASGYTLTGYYMHWVRQ | | TCRASQDIRNNLGWYQQKPG | |
| | APGQGLEWMGWMNPSSGNT | | KAPKLLIYGASSLQSGVPSRF | |
| | GYAQQFQGRVTMTRDTSTST | | SGSGSGTDFTLTISSLQPEDFA | |
| | VYMELSSLRSEDTAVYYCAR | | TYYCQQTYSSPPTFGQGTKLE | |
| | ASSDRYYYDGVWYFDLWGR | | IKR | |
| | GTLVTVSS | | | |
| 28 | EVQLLESGGGLVQPGGSLRLS | 305 | DIQMTQSPSSLSASVGDRVTI | 322 |
| | CAASGFTFSTYAMHWVRQAP | | TCRASQGIDNYLAWYQQKPG | |
| | GKGLEWVSAISGSGGSTYYAD | | KAPKLLIYQASTLESGVPSRF | |
| | SVKGRFTISRDNSKNTLYLQM | | SGSGSGTDFTLTISSLQPEDFA | |
| | NSLRAEDTAVYYCARDGYGD | | TYYCQQSYSIPWTFGQGTKV | |
| | YPFDYWGQGTLVTVSS | | EIKR | |
| 29 | QVQLVQSGAEVKKPGASVKV | 306 | DIQMTQSPSSLSASVGDRVTI | 323 |
| | SCKASGYTFTGYYLHWVRQA | | TCRASQSISRWLAWYQQKPG | |
| | PGQGLEWMGVINVRRGSTRY | | KAPKLLIYDASNLETGVPSRF | |
| | AQNFQGRVTMTRDTSTSTVY | | SGSGSGTDFTLTISSLQPEDFA | |
| | MELSSLRSEDTAVYYCARVSG | | TYYCQQGNSFPPIFGGGTKVE | |
| | SYYQPWGQGTLVTVSS | | IKR | |
| 30 | QVQLVQSGAEVKKPGASVKV | 307 | DIQMTQSPSSLSASVGDRVTI | 324 |
| | SCKASGYTFSNYYMHWVRQA | | TCRASQSISSWLAWYQQKPG | |
| | PGQGLEWMGWMNPDSGTTG | | KAPKLLIYGASSLQSGVPSRF | |
| | YAQKFQGRVTMTRDTSTSTV | | SGSGSGTDFTLTISSLOPEDFA | |
| | YMELSSLRSEDTAVYYCVRD | | TYYCQQTYRTPLTFGPGTKV | |
| | GTMVQGIFDYWGQGTLVTVS | | DIKR | |
| | S | | | |
| 31 | QVQLVQSGAEVKKPGSSVKV | 308 | DIQMTQSPSSLSASVGDRVTI | 325 |
| | SCKASGGTFSTYAITWVRQAP | | TCRASQGIGNDLGWYQQKPG | |
| | GQGLEWMGGIIPIVGRANYAQ | | KAPKLLIYGASSVQSGVPSRF | |
| | KFQGRVTITADESTSTAYMEL | | SGSGSGTDFTLTISSLQPEDFA | |
| | SSLRSEDTAVYYCARSGGHDL | | TYYCQQSYSTPITFGQGTRLEI | |
| | DYWGQGTLVTVSS | | KR | |
| 32 | EVQLLESGGGLVQPGGSLRLS | 309 | EIVMTQSPATLSVSPGERATL | 326 |
| | CAASGFTFSSYGMHWVRQAP | | SCRASQSVSSSYLAWYQQKP | |
| | GKGLEWVSSISGSGDTTYYAD | | GQAPRLLIYATSTRATGIPAR | |
| | SVKGRFTISRDNSKNTLYLQM | | FSGSGSGTEFTLTISSLQSEDF | |
| | NSLRAEDTAVYYCARDNPYG | | AVYYCQQYGSLPLTFGQGTK | |
| | DYGGSFDYWGQGTLVTVSS | | VEIKR | |
| 33 | QVQLVQSGAEVKKPGASVKV | 310 | DIQMTQSPSSLSASVGDRVTI | 327 |
| | SCKASGYTFTSYYMHWVRQA | | TCRASQGISNNLNWYQQKPG | |
| | PGQGLEWMGIIDPSGGSTNYA | | KAPKLLIYDASNLETGVPSRF | |
| | QKFQGRVTMTRDTSTSTVYM | | SGSGSGTDFTLTISSLQPEDFA | |
| | ELSSLRSEDTAVYYCARDYYG | | TYYCQQANSFPLTFGPGTKV | |
| | SGSYYGLDYWGRGTLVTVSS | | DIKR | |
| 34 | QVQLVQSGAEVKKPGASVKV | 311 | DIQMTQSPSSLSASVGDRVTI | 328 |
| | SCKASGYTFTDYYMHWVRQA | | TCRASQGIRNDLAWYQQKPG | |
| | PGQGLEWMGIINPSGGSTRYA | | KAPKLLIYAASTLONGVPSRF | |
| | QKFQGRVTMTRDTSTSTVYM | | SGSGSGTDFTLTISSLQPEDFA | |
| | ELSSLRSEDTAVYYCARVDGR | | TYYCQQSYSTPWTFGQGTKV | |
| | RWLQSDYWGQGTLVTVSS | | EIKR | |
| 35 | QVQLVQSGAEVKKPGASVKV | 312 | DIQMTQSPSSLSASVGDRVTI | 329 |
| | SCKASGYTFTDYYMHWVRQA | | TCRASQGIRNDLAWYQQKPG | |
| | PGQGLEWMGIINPSGGSTRYA | | KAPKLLIYAASTLONGVPSRF | |
| | QKFQGRVTMTRDTSTSTVYM | | SGSGSGTDFTLTISSLQPEDFA | |
| | ELSSLRSEDTAVYYCARVDGR | | TYYCQQSYSTPWTFGQGTKV | |
| | RWLRSDYWGQGTLVTVSS | | EIKR | |
| 36 | QVQLVQSGAEVKKPGASVKV | 313 | DIQMTQSPSSLSASVGDRVTI | 330 |
| | SCKASGGTFSSYAISWVRQAP | | TCQASQGINNYLNWYQQKPG | |
| | GQGLEWLGIISPSGRSAGYGR | | KAPKLLIYAASTLQRGVPSRF | |
| | KFQGRVTMTRDTSTSTVYME | | SGSGSGTDFTLTISSLQPEDFA | |
| | LSSLRSEDTAVYYCARTDYGG | | TYYCQQSYQTPLTFGGGTKV | |
| | HKWYFDLWGRGTLVTVSS | | EIKR | |
| 37 | QVQLVQSGAEVKKPGASVKV | 314 | DIQMTQSPSSLSASVGDRVTI | 331 |
| | SCKASGYTFTGYYLHWVRQA | | TCRASQSISSYLNWYQQKPG | |
| | PGQGLEWMGVISPSGGGTSYA | | KAPKLLIYAASSLQSGVPSRF | |
| | QKFQGRVTMTRDTSTSTVYM | | SGSGSGTDFTLTISSLQPEDFA | |
| | ELSSLRSEDTAVYYCARAGFG | | TYYCQQSYSTPLTFGGGTKV | |
| | EGVFRHWGQGTLVTVSS | | EIKR | |
| 38 | QVQLVQSGAEVKKPGASVKV | 315 | DIQMTQSPSSLSASVGDRVTI | 332 |
| | SCKASGYSFTSHAISWVRQAP | | TCRASQGISNYLAWYQQKPG | |
| | GQGLEWMGWIKPNSGDTKYA | | KAPKLLIYTASTLQSGVPSRF | |
| | QKFQGRVTMTRDTSTSTVYM | | SGSGSGTDFTLTISSLQPEDFA | |
| | ELSSLRSEDTAVYYCARGSDD | | TYYCQQSYSTPLTFGGGTKV | |
| | YYGSYYFDYWGQGTLVTVSS | | EIKR | |
| 39 | EVQLLESGGGLVQPGGSLRLS | 316 | DIQMTQSPSSLSASVGDRVTI | 333 |
| | CAASGFTFRNYGMGWVRQAP | | TCRASQGISNDLAWYQQKPG | |
| | GKGLEWVSAISGSGGSTYYAD | | KAPKLLIYGASNLETGVPSRF | |
| | SVKGRFTISRDNSKNTLYLQM | | SGSGSGTDFTLTISSLQPEDFA | |
| | NSLRAEDTAVYYCARVKFYG | | TYYCQQANSFPFTFGPGTKV | |
| | MDVWGQGTTVTVSS | | DIKR | |
| 40 | QVQLVQSGAEVKKPGASVKV | 317 | DIQMTQSPSSLSASVGDRVTI | 334 |
| | SCKASGYTFTDYHMHWVRQA | | TCRVSQGISSYLNWYQQKPG | |
| | PGQGLEWMGWMSPNSGNTG | | KAPKLLIYEASTLESGVPSRFS | |
| | YAQNFQGRVTMTRDTSTSTV | | GSGSGTDFTLTISSLQPEDFAT | |
| | YMELSSLRSEDTAVYYCARA | | YYCQQGYSTPPTFGQGTKVEI | |
| | DYYGSDYVKFDYWGQGTLVT | | KR | |
| | VSS | | | |
| 41 | QVQLVQSGAEVKKPGASVKV | 318 | DIVMTQSPLSLPVTPGEPASIS | 335 |
| | SCKASGYTFPNYGISWVRQAP | | CRSSQSLLQSNGYNYLDWYL | |
| | GQGLEWMGWINPNSGGTKYA | | QKPGQSPQLLIYLGSNRASGV | |
| | QRFQGRVTMTRDTSTSTVYM | | PDRFSGSGSGTDFTLKISRVE | |
| | ELSSLRSEDTAVYYCARDRDI | | AEDVGVYYCMQSTHWPLTF | |
| | LTGYYHFDYWGQGTLVTVSS | | GQGTRLEIKR | |
| 42 | QVQLVQSGAEVKKPGASVKV | 319 | DIQMTQSPSSLSASVGDRVTI | 336 |
| | SCKASGYTFTDYFMHWVRQA | | TCRASQGISNNLNWYQQKPG | |
| | PGQGLEWMGWINPNSGNTGY | | KAPKLLIYAASSLQSGVPSRF | |
| | AQKFQGRVTMTRDTSTSTVY | | SGSGSGTDFTLTISSLQPEDFA | |
| | MELSSLRSEDTAVYYCARLND | | TYYCQQSYSTPPTFGQGTKLE | |
| | YGDYGGPATLDYWGQGTLVT | | IKR | |
| | VSS | | | |

### Example 3: Identification of Anti-Human CLL-1 scFv Clones

[1243] Methods analogous to those above in Example 1 have been used to discover selective anti-human CLL-1 scFv clones. Selective anti-human CLL-1 scFv clones were discovered by standard screening methodologies of a human antibody library using two recombinant polymorphic forms of human CLL-1 extracellular domain antigens (CLL-1-K244 and CLL-1-Q244). Using these antigens various panning tactics were employed to encourage enrichment of thermostable clones of desired affinity range. The scFvs were screened for selective binding between two single nucleotide polymorphism (SNP) variants of human CLL-1 (Lysine 244 and Glutamine 244) by bio-layer interferometry (BLI).

TABLE 6a
Sequences of Anti-CLL-1 K244 Selective Polypeptides (CDR Sequences)

| Polypep- | | SEQ ID | | SEQ ID | | SEQ ID | | SEQ ID | | SEQ ID | | SEQ ID |
|---|---|---|---|---|---|---|---|---|---|---|---|---|
| tide No. | HCDR1 | NO | HCDR2 | NO | HCDR3 | NO | LCDR1 | NO | LCDR2 | NO | LCDR3 | NO |
| 43 | YTFTNY | 337 | GWISPY | 361 | CARES | 385 | RASQSI | 409 | DASNLE | 433 | CQQSYS | 457 |
| | YMH | | SGDTK | | MDRLD | | STYLN | | T | | TPVLTF | |
| | | | YA | | YW | | | | | | | |
| 44 | FTFSSY | 338 | ADISGS | 362 | CAREG | 386 | RSSQSL | 410 | LGSNRA | 434 | CMQAL | 458 |
| | AMH | | GGLTY | | DQYSSS | | LHSNG | | S | | QPPPTF | |
| | | | YA | | SFFDY | | YNYLD | | | | | |
| | | | | | W | | | | | | | |
| 45 | FTFDEF | 339 | SYISGD | 363 | CAAGY | 387 | QASQDI | 411 | AASTLE | 435 | CQQSYS | 459 |
| | GMN | | SGYTNC | | GGYYF | | DIYLN | | S | | TPPTF | |
| | | | A | | DYW | | | | | | | |
| 46 | YTFTSY | 340 | GMINPS | 364 | CASVDS | 388 | RASQSI | 412 | DASNLE | 436 | CQQAN | 460 |
| | YMH | | AGSTSY | | SGWYA | | STYLN | | T | | SFPPTF | |
| | | | A | | PFDYW | | | | | | | |
| 47 | FTFDEY | 341 | SAIGAG | 365 | CASSLG | 389 | RSSQSL | 413 | AASSLQ | 437 | CMQGI | 461 |
| | AMH | | GSTYY | | PELRGV | | LHSNG | | S | | QWPWT | |
| | | | A | | DYYYY | | YNYLD | | | | F | |
| | | | | | GMDVW | | | | | | | |
| 48 | FNFDDY | 342 | SVIYSG | 366 | CTRHDF | 390 | RASQSI | 414 | AASSLQ | 438 | CQQDY | 462 |
| | AMH | | GSTYY | | DYW | | STYVN | | S | | SYPYTF | |
| | | | A | | | | | | | | | |
| 49 | FTFSDY | 343 | SLISGD | 367 | CARDL | 391 | RASQSI | 415 | AASTLQ | 439 | CLQDYS | 463 |
| | ALH | | GGSTY | | GGERSY | | STWLA | | S | | YPPTF | |
| | | | YA | | W | | | | | | | |
| 50 | YTFTDY | 344 | GIINPSD | 368 | CARDEL | 392 | RASQSI | 416 | AASSLQ | 440 | CQQSY | 464 |
| | YMH | | GSTTYA | | PDSSG | | SSWLA | | S | | DIPLTF | |
| | | | | | WYGYF | | | | | | | |
| | | | | | QHW | | | | | | | |
| 51 | GTFSSY | 345 | GEIIPFF | 369 | CARAE | 393 | QASQDI | 417 | AASTLQ | 441 | CQQSY | 465 |
| | AIS | | GTANY | | YGGDL | | SNLLN | | S | | NTPWTF | |
| | | | A | | DYW | | | | | | | |
| 52 | DTFTRH | 346 | GIINPR | 370 | CARRD | 394 | QASQDI | 418 | QASSLE | 442 | CQQAN | 466 |
| | YVH | | GGTHY | | CSGGSC | | HNYLN | | S | | SFPLTF | |
| | | | A | | YSDLD | | | | | | | |
| | | | | | YW | | | | | | | |
| 53 | GTFSSY | 347 | GWINPD | 371 | CATFGE | 395 | RASQNI | 419 | GASILQ | 443 | CQQAN | 467 |
| | AIS | | SGDASY | | EAFDIW | | GSWLA | | S | | SFPLTF | |
| | | | A | | | | | | | | | |
| 54 | GTFSSY | 348 | GWIDPK | 372 | CATEGS | 396 | RASQGI | 420 | EASTLQ | 444 | CHQYN | 468 |
| | AIS | | NGDTN | | HHPYY | | GNWLA | | S | | AYPWT | |
| | | | YA | | YYGMD | | | | | | F | |
| | | | | | VW | | | | | | | |
| 55 | YTFTGY | 349 | GWINPN | 373 | CARPNT | 397 | QASQDI | 421 | AASSLQ | 445 | CQQYN | 469 |
| | HMH | | TGGTN | | AMVPP | | SNYLN | | S | | SYPLTF | |
| | | | YA | | YYYYY | | | | | | | |
| | | | | | GMDVW | | | | | | | |
| 56 | YTFTSY | 350 | GWMNP | 374 | CARVS | 398 | RASHSI | 422 | DASNLE | 446 | CQQAD | 470 |
| | DIN | | NSGNT | | ATGTY | | SSWLA | | T | | SFPLTF | |
| | | | GYA | | GLDYW | | | | | | | |
| 57 | YTFNN | 351 | GIINPIT | 375 | CASGEQ | 399 | QASQDI | 423 | GASNL | 447 | CLQHNS | 471 |
| | YGIT | | GVTTY | | QLVLFD | | NDYLN | | QS | | YPLTF | |
| | | | A | | YW | | | | | | | |
| 58 | YTFTDY | 352 | GWMNP | 376 | CAADVI | 400 | RASQGI | 424 | DASNLE | 448 | CQQSY | 472 |
| | YLH | | NSGNT | | TAYGM | | SNYLA | | T | | NVPPTF | |
| | | | GYA | | DVW | | | | | | | |
| 59 | FTFSNA | 353 | ADISYD | 377 | CTTEEL | 401 | RASQSI | 425 | DASNLE | 449 | CQQAN | 473 |
| | WMS | | GTNDY | | RFGGFD | | SSYLN | | T | | SFPLTF | |
| | | | YA | | YW | | | | | | | |
| 60 | GTFSSY | 354 | GGIIPM | 378 | CARDL | 402 | RASQSI | 426 | DASSRA | 450 | CQQYK | 474 |
| | AIS | | FGTAN | | GYSNA | | GTYLA | | T | | SYPLTF | |
| | | | YA | | GGTLH | | | | | | | |
| | | | | | YW | | | | | | | |
| 61 | YTFTNY | 355 | GIINPSG | 379 | CARAE | 403 | QASQDI | 427 | GASSLQ | 451 | CQQHN | 475 |
| | YMH | | GSTSYA | | WDILTG | | SNYLN | | S | | SYPWTF | |
| | | | | | YYIDY | | | | | | | |
| | | | | | W | | | | | | | |
| 62 | YTFTDH | 356 | GWISAY | 380 | CARAE | 404 | RASQGI | 428 | DASNLE | 452 | CQQTSS | 476 |
| | FVH | | NGNTN | | YSYGFD | | HNYLA | | T | | FPYTF | |
| | | | YA | | YW | | | | | | | |
| 63 | YTFTGY | 357 | GVINPS | 381 | CARDRS | 405 | QASQDI | 429 | DASNL | 453 | CLQHNS | 477 |
| | YVH | | GGGSPS | | DVDYG | | SNYLN | | QS | | YPLTF | |
| | | | YA | | MDVW | | | | | | | |
| 64 | YTFTDY | 358 | GLIDPS | 382 | CARDV | 406 | RSSQSL | 430 | AASTLQ | 454 | CMQGT | 478 |
| | YMH | | GGSTNS | | GFGELS | | LHSNG | | S | | HWPPTF | |
| | | | L | | FDIW | | YNYLD | | | | | |
| 65 | YTFTGY | 359 | GWINPN | 383 | CAREIG | 407 | RASQSI | 431 | AASSLQ | 455 | CQQSYT | 479 |
| | YMH | | SGGTN | | GYDNY | | GTYLN | | S | | DPWTF | |
| | | | YA | | YYYGM | | | | | | | |
| | | | | | DVW | | | | | | | |
| 66 | YTFNTY | 360 | GWMHP | 384 | CARGTT | 408 | RASQSI | 432 | SASNLQ | 456 | CQQSYS | 480 |
| | YMH | | NTGNT | | SDAFDI | | FSYLN | | S | | TPITF | |
| | | | GYA | | W | | | | | | | |

TABLE 6b
Sequences of Anti-CLL-1 K244 Selective Polypeptides (VH and VL Sequences)

| Polypep- | | SEQ ID | | SEQ ID |
|---|---|---|---|---|
| tide No. | Full VH | NO | Full VL | NO |
| 43 | QVQLVQSGAEVKKPGASVKV | 481 | DIQMTQSPSSLSASVGDRVTI | 505 |
| | SCKASGYTFTNYYMHWVRQA | | TCRASQSISTYLNWYQQKPG | |
| | PGQGLEWLGWISPYSGDTKY | | KAPKLLIYDASNLETGVPSRF | |
| | AQTLQGRVTMTRDTSTSTVY | | SGSGSGTDFTLTISSLQPEDFA | |
| | MELSSLRSEDTAVYYCARESM | | TYYCQQSYSTPVLTFGGGTK | |
| | DRLDYWGQGTLVTVSS | | VEIKR | |
| 44 | EVQLLESGGGLVQPGGSLRLS | 482 | DIVMTQSPLSLPVTPGEPASIS | 506 |
| | CAASGFTFSSYAMHWVRQAP | | CRSSQSLLHSNGYNYLDWYL | |
| | GKGLEWVADISGSGGLTYYA | | QKPGQSPQLLIYLGSNRASGV | |
| | DSVKGRFTISRDNSKNTLYLQ | | PDRFSGSGSGTDFTLKISRVE | |
| | MNSLRAEDTAVYYCAREGDQ | | AEDVGVYYCMQALQPPPTFG | |
| | YSSSSFFDYWGQGTLVTVSS | | QGTRLEIKR | |
| 45 | EVQLVESGGGLVKPGGSLRLS | 483 | DIQMTQSPSSLSASVGDRVTI | 507 |
| | CAASGFTFDEFGMNWVRQAP | | TCQASQDIDIYLNWYQQKPG | |
| | GKGLEWISYISGDSGYTNCAD | | KAPKLLIYAASTLESGVPSRF | |
| | SVKGRFTISRDDSKNTLYLQM | | SGSGSGTDFTLTISSLQPEDFA | |
| | NSLKTEDTAVYYCAAGYGGY | | TYYCQQSYSTPPTFGGGTKV | |
| | YFDYWGQGTLVTVSS | | EIKR | |
| 46 | QVQLVQSGAEVKKPGASVKV | 484 | DIQMTQSPSSLSASVGDRVTI | 508 |
| | SCKASGYTFTSYYMHWVRQA | | TCRASQSISTYLNWYQQKPG | |
| | PGQGLEWMGMINPSAGSTSY | | KAPKLLIYDASNLETGVPSRF | |
| | AQKFQGRVTMTRDTSTSTVY | | SGSGSGTDFTLTISSLQPEDFA | |
| | MELSSLRSEDTAVYYCASVDS | | TYYCQQANSFPPTFGGGTKV | |
| | SGWYAPFDYWGQGTLVTVSS | | EIKR | |
| 47 | EVQLLESGGGLVQPGGSLRLS | 485 | DIVMTQSPLSLPVTPGEPASIS | 509 |
| | CAASGFTFDEYAMHWVRQAP | | CRSSQSLLHSNGYNYLDWYL | |
| | GKGLEWVSAIGAGGSTYYAD | | QKPGQSPQLLIYAASSLQSGV | |
| | SVKGRFTISRDNSKNTLYLQM | | PDRFSGSGSGTDFTLKISRVE | |
| | NSLRAEDTAVYYCASSLGPEL | | AEDVGVYYCMQGIQWPWTF | |
| | RGVDYYYYGMDVWGQGTTV | | GQGTKVEIKR | |
| | TVSS | | | |
| 48 | EVQLLESGGGLVQPGGSLRLS | 486 | DIQMTQSPSSLSASVGDRVTI | 510 |
| | CAASGFNFDDYAMHWVRQA | | TCRASQSISTYVNWYQQKPG | |
| | PGKGLEWVSVIYSGGSTYYAD | | KAPKLLIYAASSLQSGVPSRF | |
| | SVKGRFTISRDNSKNTLYLQM | | SGSGSGTDFTLTISSLQPEDFA | |
| | NSLRAEDTAVYYCTRHDFDY | | TYYCQQDYSYPYTFGQGTKV | |
| | WGQGTLVTVSS | | EIKR | |
| 49 | EVOLVESGGGLVKPGGSLRLS | 487 | DIQMTQSPSSLSASVGDRVTI | 511 |
| | CAASGFTFSDYALHWVRQAP | | TCRASQSISTWLAWYQQKPG | |
| | GKGLEWVSLISGDGGSTYYA | | KAPKLLIYAASTLQSGVPSRF | |
| | DSVKGRFTISRDDSKNTLYLQ | | SGSGSGTDFTLTISSLQPEDFA | |
| | MNSLKTEDTAVYYCARDLGG | | TYYCLQDYSYPPTFGQGTKV | |
| | ERSYWGQGTLVTVSS | | EIKR | |
| 50 | QVQLVQSGAEVKKPGASVKV | 488 | DIQMTQSPSSLSASVGDRVTI | 512 |
| | SCKASGYTFTDYYMHWVRQA | | TCRASQSISSWLAWYQQKPG | |
| | PGQGLEWMGIINPSDGSTTYA | | KAPKLLIYAASSLQSGVPSRF | |
| | QSFQGRVTMTRDTSTSTVYM | | SGSGSGTDFTLTISSLOPEDFA | |
| | ELSSLRSEDTAVYYCARDELP | | TYYCQQSYDIPLTFGGGTKVE | |
| | DSSGWYGYFQHWGQGTLVT | | IKR | |
| | VSS | | | |
| 51 | QVQLVQSGAEVKKPGSSVKV | 489 | DIQMTQSPSSLSASVGDRVTI | 513 |
| | SCKASGGTFSSYAISWVRQAP | | TCQASQDISNLLNWYQQKPG | |
| | GOGLEWMGEIIPFFGTANYAQ | | KAPKLLIYAASTLQSGVPSRF | |
| | KFQGRVTITADESTSTAYMEL | | SGSGSGTDFTLTISSLQPEDFA | |
| | SSLRSEDTAVYYCARAEYGG | | TYYCQQSYNTPWTFGPGTKV | |
| | DLDYWGQGTLVTVSS | | DIKR | |
| 52 | QVQLVQSGAEVKKPGASVKV | 490 | DIQMTQSPSSLSASVGDRVTI | 514 |
| | SCKASGDTFTRHYVHWVRQA | | TCQASQDIHNYLNWYQQKPG | |
| | PGQGLEWMGIINPRGGTHYA | | KAPKLLIYQASSLESGVPSRFS | |
| | QKFQGRVTMTRDTSTSTVYM | | GSGSGTDFTLTISSLQPEDFAT | |
| | ELSSLRSEDTAVYYCARRDCS | | YYCQQANSFPLTFGGGTKLEI | |
| | GGSCYSDLDYWGQGTLVTVS | | KR | |
| | S | | | |
| 53 | QVQLVQSGAEVKKPGASVKV | 491 | DIQMTQSPSSLSASVGDRVTI | 515 |
| | SCKASGGTFSSYAISWVRQAP | | TCRASQNIGSWLAWYQQKPG | |
| | GQGLEWMGWINPDSGDASYA | | KAPKLLIYGASILQSGVPSRFS | |
| | RKFQGRVTMTRDTSTSTVYM | | GSGSGTDFTLTISSLQPEDFAT | |
| | ELSSLRSEDTAVYYCATFGEE | | YYCQQANSFPLTFGGGTKLEI | |
| | AFDIWGQGTMVTVSS | | KR | |
| 54 | QVQLVQSGAEVKKPGASVKV | 492 | DIQMTQSPSSLSASVGDRVTI | 516 |
| | SCKASGGTFSSYAISWVRQAP | | TCRASQGIGNWLAWYQQKP | |
| | GQGLEWMGWIDPKNGDTNY | | GKAPKLLIYEASTLQSGVPSR | |
| | AQKFQGRVTMTRDTSTSTVY | | FSGSGSGTDFTLTISSLQPEDF | |
| | MELSSLRSEDTAVYYCATEGS | | ATYYCHQYNAYPWTFGQGT | |
| | HHPYYYYGMDVWGQGTTVT | | KVEIKR | |
| | VSS | | | |
| 55 | QVQLVQSGAEVKKPGASVKV | 493 | DIQMTQSPSSLSASVGDRVTI | 517 |
| | SCKASGYTFTGYHMHWVRQA | | TCQASQDISNYLNWYQQKPG | |
| | PGQGLEWMGWINPNTGGTNY | | KAPKLLIYAASSLQSGVPSRF | |
| | AQKFQGRVTMTRDTSTSTVY | | SGSGSGTDFTLTISSLQPEDFA | |
| | MELSSLRSEDTAVYYCARPNT | | TYYCQQYNSYPLTFGQGTKL | |
| | AMVPPYYYYYGMDVWGQGT | | EIKR | |
| | LVTVSS | | | |
| 56 | QVQLVQSGAEVKKPGASVKV | 494 | DIQMTQSPSSLSASVGDRVTI | 518 |
| | SCKASGYTFTSYDINWVRQAP | | TCRASHSISSWLAWYQQKPG | |
| | GQGLEWMGWMNPNSGNTGY | | KAPKLLIYDASNLETGVPSRF | |
| | AQKFQGRVTMTRDTSTSTVY | | SGSGSGTDFTLTISSLOPEDFA | |
| | MELSSLRSEDTAVYYCARVSA | | TYYCQQADSFPLTFGGGTKV | |
| | TGTYGLDYWGQGTLVTVSS | | EIKR | |
| 57 | QVQLVQSGAEVKKPGASVKV | 495 | DIQMTQSPSSLSASVGDRVTI | 519 |
| | SCKASGYTFNNYGITWVRQAP | | TCQASQDINDYLNWYQQKPG | |
| | GQGLEWMGIINPITGVTTYAQ | | KAPKLLIYGASNLQSGVPSRF | |
| | NFQGRVTMTRDTSTSTVYME | | SGSGSGTDFTLTISSLQPEDFA | |
| | LSSLRSEDTAVYYCASGEQQL | | TYYCLQHNSYPLTFGQGTKL | |
| | VLFDYWGQGTLVTVSS | | EIKR | |
| 58 | QVQLVQSGAEVKKPGASVKV | 496 | DIQMTQSPSSLSASVGDRVTI | 520 |
| | SCKASGYTFTDYYLHWVRQA | | TCRASQGISNYLAWYQQKPG | |
| | PGQGLEWMGWMNPNSGNTG | | KAPKLLIYDASNLETGVPSRF | |
| | YAQKFQGRVTMTRDTSTSTV | | SGSGSGTDFTLTISSLQPEDFA | |
| | YMELSSLRSEDTAVYYCAAD | | TYYCQQSYNVPPTFGQGTKV | |
| | VITAYGMDVWGQGTMVTVSS | | EIKR | |
| 59 | EVQLLESGGGLVQPGGSLRLS | 497 | DIQMTQSPSSLSASVGDRVTI | 521 |
| | CAASGFTFSNAWMSWVRQAP | | TCRASQSISSYLNWYQQKPG | |
| | GKGLEWVADISYDGTNDYYA | | KAPKLLIYDASNLETGVPSRF | |
| | DSVKGRFTISRDNSKNTLYLQ | | SGSGSGTDFTLTISSLQPEDFA | |
| | MNSLRAEDTAVYYCTTEELRF | | TYYCQQANSFPLTFGQGTKV | |
| | GGFDYWGQGTLVTVSS | | EIKR | |
| 60 | QVQLVQSGAEVKKPGSSVKV | 498 | EIVMTQSPATLSVSPGERATL | 522 |
| | SCKASGGTFSSYAISWVRQAP | | SCRASQSIGTYLAWYQQKPG | |
| | GQGLEWMGGIIPMFGTANYA | | QAPRLLIYDASSRATGIPARFS | |
| | QKFQGRVTITADESTSTAYME | | GSGSGTEFTLTISSLQSEDFAV | |
| | LSSLRSEDTAVYYCARDLGYS | | YYCQQYKSYPLTFGGGTKVE | |
| | NAGGTLHYWGQGTLVTVSS | | IKR | |
| 61 | QVQLVQSGAEVKKPGASVKV | 499 | DIQMTQSPSSLSASVGDRVTI | 523 |
| | SCKASGYTFTNYYMHWVRQA | | TCQASQDISNYLNWYQQKPG | |
| | PGQGLEWMGIINPSGGSTSYA | | KAPKLLIYGASSLQSGVPSRF | |
| | QKFQGRVTMTRDTSTSTVYM | | SGSGSGTDFTLTISSLQPEDFA | |
| | ELSSLRSEDTAVYYCARAEW | | TYYCQQHNSYPWTFGQGTK | |
| | DILTGYYIDYWGQGTLVTVSS | | VEIKR | |
| 62 | QVQLVQSGAEVKKPGASVKV | 500 | DIQMTQSPSSLSASVGDRVTI | 524 |
| | SCKASGYTFTDHFVHWVRQA | | TCRASQGIHNYLAWYQQKPG | |
| | PGQGLEWMGWISAYNGNTNY | | KAPKLLIYDASNLETGVPSRF | |
| | AQKFQGRVTMTRDTSTSTVY | | SGSGSGTDFTLTISSLQPEDFA | |
| | MELSSLRSEDTAVYYCARAEY | | TYYCQQTSSFPYTFGQGTKLE | |
| | SYGFDYWGQGTLVTVSS | | IKR | |
| 63 | QVQLVQSGAEVKKPGASVKV | 501 | DIQMTQSPSSLSASVGDRVTI | 525 |
| | SCKASGYTFTGYYVHWVRQA | | TCQASQDISNYLNWYQQKPG | |
| | PGQGLEWMGVINPSGGGSPSY | | KAPKLLIYDASNLQSGVPSRF | |
| | AQKFQGRVTMTRDTSTSTVY | | SGSGSGTDFTLTISSLOPEDFA | |
| | MELSSLRSEDTAVYYCARDRS | | TYYCLQHNSYPLTFGGGTKV | |
| | DVDYGMDVWGQGTTVTVSS | | EIKR | |
| 64 | QVQLVQSGAEVKKPGASVKV | 502 | DIVMTQSPLSLPVTPGEPASIS | 526 |
| | SCKASGYTFTDYYMHWVRQA | | CRSSQSLLHSNGYNYLDWYL | |
| | PGQGLEWMGLIDPSGGSTNSL | | QKPGQSPQLLIYAASTLQSGV | |
| | QKFQGRVTMTRDTSTSTVYM | | PDRFSGSGSGTDFTLKISRVE | |
| | ELSSLRSEDTAVYYCARDVGF | | AEDVGVYYCMQGTHWPPTF | |
| | GELSFDIWGQGTTVTVSS | | GPGTKVDIKR | |
| 65 | QVQLVQSGAEVKKPGASVKV | 503 | DIQMTQSPSSLSASVGDRVTI | 527 |
| | SCKASGYTFTGYYMHWVRQA | | TCRASQSIGTYLNWYQQKPG | |
| | PGQGLEWMGWINPNSGGTNY | | KAPKLLIYAASSLQSGVPSRF | |
| | AQKFQGRVTMTRDTSTSTVY | | SGSGSGTDFTLTISSLOPEDFA | |
| | MELSSLRSEDTAVYYCAREIG | | TYYCQQSYTDPWTFGQGTKV | |
| | GYDNYYYYGMDVWGQGTTV | | EIKR | |
| | TVSS | | | |
| 66 | QVQLVQSGAEVKKPGASVKV | 504 | DIQMTQSPSSLSASVGDRVTI | 528 |
| | SCKASGYTFNTYYMHWVRQA | | TCRASQSIFSYLNWYQQKPG | |
| | PGQGLEWMGWMHPNTGNTG | | KAPKLLIYSASNLQSGVPSRF | |
| | YAQKFQGRVTMTRDTSTSTV | | SGSGSGTDFTLTISSLQPEDFA | |
| | YMELSSLRSEDTAVYYCARGT | | TYYCQQSYSTPITFGQGTKVE | |
| | TSDAFDIWGQGTMVTVSS | | IKR | |

TABLE 7a
Sequences of Anti-CLL-1 K244Q Selective Polypeptides (CDR Sequences)

| Polypeptide | | SEQ ID | | SEQ ID | | SEQ ID | | SEQ ID | | SEQ ID | | SEQ ID |
|---|---|---|---|---|---|---|---|---|---|---|---|---|
| No. | HCDR1 | NO | HCDR2 | NO | HCDR3 | NO | LCDR1 | NO | LCDR2 | NO | LCDR3 | NO |
| 67 | DTFTR | 529 | GRVNP | 551 | CAKD | 573 | RASQG | 595 | DASNL | 617 | CQQAS | 639 |
| | HYVH | | RDGRT | | MFPTV | | ISSYLA | | ET | | GFPYT | |
| | | | NSA | | TGTYY | | | | | | F | |
| | | | | | YYGM | | | | | | | |
| | | | | | DVW | | | | | | | |
| 68 | YTFSS | 530 | GWINP | 552 | CARHR | 574 | RASQSI | 596 | ATSSL | 618 | CQQGY | 640 |
| | YDIN | | RNGGT | | WELDS | | SNYLN | | QS | | NIPFTF | |
| | | | DYA | | FDYW | | | | | | | |
| 69 | YTFTS | 531 | GWMN | 553 | CARDD | 575 | RASESI | 597 | DASNL | 619 | CQQYD | 641 |
| | YYIH | | PNDGK | | DYGGY | | SGWLA | | ET | | TWPFT | |
| | | | TAYA | | VAYW | | | | | | F | |
| 70 | MSVTS | 532 | SSIYPD | 554 | CARDE | 576 | QASQSI | 598 | AASTL | 620 | CQQSY | 642 |
| | NHMS | | GKTYY | | EDWFD | | SNWLA | | QS | | STPWT | |
| | | | A | | PW | | | | | | F | |
| 71 | FTFSN | 533 | AVIWP | 555 | CARED | 577 | QASQD | 599 | GASTL | 621 | CQQYD | 643 |
| | HYMS | | DGSKE | | YYGSG | | ISNYL | | QS | | SYPPTF | |
| | | | YYA | | MDYW | | N | | | | | |
| 72 | GTFSN | 534 | GWISA | 556 | CAIGD | 578 | QASED | 600 | DASNL | 622 | CQQAN | 644 |
| | YAIS | | YNGNS | | YFDY | | INKYL | | ET | | SFPLTF | |
| | | | DYA | | W | | N | | | | | |
| 73 | FTVSS | 535 | AVIYS | 557 | CARED | 579 | RASQSI | 601 | DASNL | 623 | CQQAH | 645 |
| | NYMS | | DGKTY | | SSGSH | | STYLN | | ET | | SFPPTF | |
| | | | YA | | FDYW | | | | | | | |
| 74 | YTFTK | 536 | GGIIPIF | 558 | CARGS | 580 | RASQG | 602 | DASYL | 624 | CQQSY | 646 |
| | YEIN | | GTANY | | GWYTP | | ISNNL | | ET | | SAPLTF | |
| | | | A | | LFDYW | | N | | | | | |
| 75 | YTFTD | 537 | GLIDPS | 559 | CARDY | 581 | RASQS | 603 | DASAR | 625 | CQQYR | 647 |
| | YYIH | | GGSTSI | | DILTGS | | VSSYL | | AT | | SSVTF | |
| | | | A | | GFDPW | | A | | | | | |
| 76 | YTFTT | 538 | GIINVS | 560 | CAKEP | 582 | QASQD | 604 | DASNL | 626 | CQQAN | 648 |
| | YYMH | | AGTTS | | YPHQS | | INNYL | | ET | | SFPLTF | |
| | | | YA | | GWFFD | | N | | | | | |
| | | | | | YW | | | | | | | |
| 77 | YTFTG | 539 | GWIST | 561 | CARDT | 583 | SASQS | 605 | DVSTR | 627 | CQQYY | 649 |
| | HYMH | | DNGNA | | ADYYF | | VGSSY | | AT | | STPLTF | |
| | | | NYA | | DYW | | FA | | | | | |
| 78 | GTFSR | 540 | GWMN | 562 | CARGD | 584 | QASQD | 606 | DASNL | 628 | CQQSY | 650 |
| | YPFS | | PNNGD | | YPYMD | | ISNYL | | ET | | SIPYTF | |
| | | | TGYA | | VW | | N | | | | | |
| 79 | YTFTS | 541 | GWMN | 563 | CARDY | 585 | RASQG | 607 | AASSL | 629 | CLQTN | 651 |
| | DYMH | | PNSGG | | ITGPSD | | IRNDL | | QP | | SFPWT | |
| | | | TNYA | | W | | G | | | | F | |
| 80 | FTFTSY | 542 | GWMN | 564 | CARGH | 586 | RASQSI | 608 | DTSSL | 630 | CQQGY | 652 |
| | YMH | | PNSGN | | SRTDY | | SSWLA | | QS | | STPLTF | |
| | | | TGYA | | GMDV | | | | | | | |
| | | | | | W | | | | | | | |
| 81 | FTFSD | 543 | SIIYPD | 565 | CAREG | 587 | QASQD | 609 | GASTL | 631 | CQQSY | 653 |
| | HYMS | | GKTYY | | SYGDY | | ISNYL | | QS | | STPWT | |
| | | | A | | DGMD | | N | | | | F | |
| | | | | | VW | | | | | | | |
| 82 | GTFSN | 544 | GGIIPIF | 566 | CAREA | 588 | RASQS | 610 | GASTR | 632 | CQQYA | 654 |
| | YDIS | | GTANY | | EEGGW | | VSSYL | | AT | | FSPITF | |
| | | | A | | FDPW | | A | | | | | |
| 83 | YTFTD | 545 | GWMN | 567 | CAKDT | 589 | RVSQG | 611 | DASNL | 633 | CQQSY | 655 |
| | YYMH | | PNSGY | | PGSGW | | ISSYLN | | ET | | STPLTF | |
| | | | TAYA | | SSGMD | | | | | | | |
| | | | | | VW | | | | | | | |
| 84 | GTFSN | 546 | GWINP | 568 | CARVG | 590 | RASQSI | 612 | DASNL | 634 | CLQTH | 656 |
| | YAIS | | NSGGT | | YYDSS | | SSWLA | | ET | | SFPLTF | |
| | | | NYA | | GGGM | | | | | | | |
| | | | | | DVW | | | | | | | |
| 85 | YTFTG | 547 | GIINPI | 569 | CASGA | 591 | RASQS | 613 | DASNL | 635 | CQQAN | 657 |
| | YYMH | | GGLTT | | YGDYV | | VSNWL | | QT | | SFPLTF | |
| | | | YA | | DWYF | | A | | | | | |
| | | | | | DLW | | | | | | | |
| 86 | YTFTT | 548 | GWINP | 570 | CARLT | 592 | RSSRSL | 614 | LGSYR | 636 | CMQGT | 658 |
| | YGIS | | NSGDT | | TATDS | | LHSNG | | AS | | HWPPT | |
| | | | NYA | | FDLW | | YNYLD | | | | F | |
| 87 | YSFTN | 549 | GWMN | 571 | CTTDE | 593 | RASQSI | 615 | DASNL | 637 | CQQAN | 659 |
| | YYIH | | PYTGQ | | ETMDF | | SRYLN | | ET | | TFPITF | |
| | | | TGYA | | HLW | | | | | | | |
| 88 | YTFTG | 550 | GRINP | 572 | CARET | 594 | RSSRSL | 616 | LGSDR | 638 | CMQGT | 660 |
| | YHIH | | NSGGT | | YSGSY | | LHSNG | | AS | | HWPPT | |
| | | | DYA | | EESFD | | YNYLD | | | | F | |
| | | | | | YW | | | | | | | |

TABLE 7b
Sequences of Anti-CLL-1 K244Q Polypeptides (VH and VL Sequences)

| | | SEQ ID | | SEQ ID |
|---|---|---|---|---|
| Polypeptide No. | Full VH | NO | Full VL | NO |
| 67 | QVQLVQSGAEVKKPGASVKV | 661 | DIQMTQSPSSLSASVGDRVTI | 683 |
| | SCKASGDTFTRHYVHWVRQA | | TCRASQGISSYLAWYQQKPG | |
| | PGQGLEWMGRVNPRDGRTNS | | KAPKLLIYDASNLETGVPSRF | |
| | AQKFQGRVTMTRDTSTSTVY | | SGSGSGTDFTLTISSLQPEDFA | |
| | MELSSLRSEDTAVYYCAKDM | | TYYCQQASGFPYTFGQGTRL | |
| | FPTVTGTYYYYGMDVWGQG | | EIKR | |
| | TTVTVSS | | | |
| 68 | QVQLVQSGAEVKKPGASVKV | 662 | DIQMTQSPSSLSASVGDRVTI | 684 |
| | SCKASGYTFSSYDINWVRQAP | | TCRASQSISNYLNWYQQKPG | |
| | GQGLEWVGWINPRNGGTDYA | | KAPKLLIYATSSLQSGVPSRFS | |
| | QKFQGRVTMTRDTSTSTVYM | | GSGSGTDFTLTISSLQPEDFAT | |
| | ELSSLRSEDTAVYYCARHRWE | | YYCQQGYNIPFTFGQGTKLEI | |
| | LDSFDYWGQGTLVTVSS | | KR | |
| 69 | QVQLVQSGAEVKKPGASVKV | 663 | DIQMTQSPSSLSASVGDRVTI | 685 |
| | SCKASGYTFTSYYIHWVRQAP | | TCRASESISGWLAWYQQKPG | |
| | GQGLEWMGWMNPNDGKTAY | | KAPKLLIYDASNLETGVPSRF | |
| | AQRFQGRVTMTRDTSTSTVY | | SGSGSGTDFTLTISSLQPEDFA | |
| | MELSSLRSEDTAVYYCARDD | | TYYCQQYDTWPFTFGPGTKV | |
| | DYGGYVAYWGQGTLVTVSS | | DIKR | |
| 70 | EVQLLESGGGLVQPGGSLRLS | 664 | DIQMTQSPSSLSASVGDRVTI | 686 |
| | CAASGMSVTSNHMSWVRQAP | | TCQASQSISNWLAWYQQKPG | |
| | GKGLEWVSSIYPDGKTYYADS | | KAPKLLIYAASTLQSGVPSRF | |
| | VKGRFTISRDNSKNTLYLQMN | | SGSGSGTDFTLTISSLQPEDFA | |
| | SLRAEDTAVYYCARDEEDWF | | TYYCQQSYSTPWTFGQGTKV | |
| | DPWGQGTLVTVSS | | EIKR | |
| 71 | EVQLLESGGGLVQPGGSLRLS | 665 | DIQMTQSPSSLSASVGDRVTI | 687 |
| | CAASGFTFSNHYMSWVRQAP | | TCQASQDISNYLNWYQQKPG | |
| | GKGLEWVAVIWPDGSKEYYA | | KAPKLLIYGASTLQSGVPSRF | |
| | DSVKGRFTISRDNSKNTLYLQ | | SGSGSGTDFTLTISSLQPEDFA | |
| | MNSLRAEDTAVYYCAREDYY | | TYYCQQYDSYPPTFGGGTKV | |
| | GSGMDYWGQGTLVTVSS | | EIKR | |
| 72 | QVQLVQSGAEVKKPGASVKV | 666 | DIQMTQSPSSLSASVGDRVTI | 688 |
| | SCKASGGTFSNYAISWVRQAP | | TCQASEDINKYLNWYQQKPG | |
| | GQGLEWMGWISAYNGNSDY | | KAPKLLIYDASNLETGVPSRF | |
| | AQNLQGRVTMTRDTSTSTVY | | SGSGSGTDFTLTISSLQPEDFA | |
| | MELSSLRSEDTAVYYCAIGDY | | TYYCQQANSFPLTFGQGTKV | |
| | FDYWGQGTLVTVSS | | EIKR | |
| 73 | EVQLLESGGGLVQPGGSLRLS | 667 | DIQMTQSPSSLSASVGDRVTI | 689 |
| | CAASGFTVSSNYMSWVRQAP | | TCRASQSISTYLNWYQQKPG | |
| | GKGLEWVAVIYSDGKTYYAD | | KAPKLLIYDASNLETGVPSRF | |
| | SVKGRFTISRDNSKNTLYLQM | | SGSGSGTDFTLTISSLQPEDFA | |
| | NSLRAEDTAVYYCAREDSSGS | | TYYCQQAHSFPPTFGQGTRLE | |
| | HFDYWGQGTLVTVSS | | IKR | |
| 74 | QVQLVQSGAEVKKPGSSVKV | 668 | DIQMTQSPSSLSASVGDRVTI | 690 |
| | SCKASGYTFTKYEINWVRQAP | | TCRASQGISNNLNWYQQKPG | |
| | GQGLEWMGGIIPIFGTANYAQ | | KAPKLLIYDASYLETGVPSRF | |
| | KFQGRVTITADESTSTAYMEL | | SGSGSGTDFTLTISSLQPEDFA | |
| | SSLRSEDTAVYYCARGSGWY | | TYYCQQSYSAPLTFGQGTKV | |
| | TPLFDYWGQGTLVTVSS | | EIKR | |
| 75 | QVQLVQSGAEVKKPGASVKV | 669 | EIVMTQSPATLSVSPGERATL | 691 |
| | SCKASGYTFTDYYIHWVRQAP | | SCRASQSVSSYLAWYQQKPG | |
| | GQGLEWMGLIDPSGGSTSIAQ | | QAPRLLIYDASARATGIPARF | |
| | KFQGRVTMTRDTSTSTVYME | | SGSGSGTEFTLTISSLQSEDFA | |
| | LSSLRSEDTAVYYCARDYDIL | | VYYCQQYRSSVTFGQGTRLEI | |
| | TGSGFDPWGQGTLVTVSS | | KR | |
| 76 | QVQLVQSGAEVKKPGASVKV | 670 | DIQMTQSPSSLSASVGDRVTI | 692 |
| | SCKASGYTFTTYYMHWVRQA | | TCQASQDINNYLNWYQQKPG | |
| | PGQGLEWMGIINVSAGTTSYA | | KAPKLLIYDASNLETGVPSRF | |
| | QKFQGRVTMTRDTSTSTVYM | | SGSGSGTDFTLTISSLQPEDFA | |
| | ELSSLRSEDTAVYYCAKEPYP | | TYYCQQANSFPLTFGGGTKV | |
| | HQSGWFFDYWGQGTLVTVSS | | EIKR | |
| 77 | QVQLVQSGAEVKKPGASVKV | 671 | EIVMTQSPATLSVSPGERATL | 693 |
| | SCKASGYTFTGHYMHWVRQA | | SCSASQSVGSSYFAWYQQKP | |
| | PGQGLEWMGWISTDNGNANY | | GQAPRLLIYDVSTRATGIPAR | |
| | AQKFQGRVTMTRDTSTSTVY | | FSGSGSGTEFTLTISSLQSEDF | |
| | MELSSLRSEDTAVYYCARDTA | | AVYYCQQYYSTPLTFGPGTK | |
| | DYYFDYWGQGTLVTVSS | | VDIKR | |
| 78 | QVQLVQSGAEVKKPGSSVKV | 672 | DIQMTQSPSSLSASVGDRVTI | 694 |
| | SCKASGGTFSRYPFSWVRQAP | | TCQASQDISNYLNWYQQKPG | |
| | GQGLEWMGWMNPNNGDTGY | | KAPKLLIYDASNLETGVPSRF | |
| | AQKFQGRVTITADESTSTAYM | | SGSGSGTDFTLTISSLQPEDFA | |
| | ELSSLRSEDTAVYYCARGDYP | | TYYCQQSYSIPYTFGQGTKLE | |
| | YMDVWGKGTTVTVSS | | IKR | |
| 79 | QVQLVQSGAEVKKPGASVKV | 673 | DIQMTQSPSSLSASVGDRVTI | 695 |
| | SCKASGYTFTSDYMHWVRQA | | TCRASQGIRNDLGWYQQKPG | |
| | PGQGLEWMGWMNPNSGGTN | | KAPKLLIYAASSLQPGVPSRF | |
| | YAQKFQGRVTMTRDTSTSTV | | SGSGSGTDFTLTISSLQPEDFA | |
| | YMELSSLRSEDTAVYYCARD | | TYYCLQTNSFPWTFGQGTKL | |
| | YITGPSDWGQGTLVTVSS | | EIKR | |
| 80 | QVQLVQSGAEVKKPGASVKV | 674 | DIQMTQSPSSLSASVGDRVTI | 696 |
| | SCKASGFTFTSYYMHWVRQA | | TCRASQSISSWLAWYQQKPG | |
| | PGQGLEWMGWMNPNSGNTG | | KAPKLLIYDTSSLQSGVPSRFS | |
| | YAQRFQGRVTMTRDTSTSTV | | GSGSGTDFTLTISSLQPEDFAT | |
| | YMELSSLRSEDTAVYYCARG | | YYCQQGYSTPLTFGQGTKVEI | |
| | HSRTDYGMDVWGQGTTVTVS | | KR | |
| | S | | | |
| 81 | EVQLLESGGGLVQPGGSLRLS | 675 | DIQMTQSPSSLSASVGDRVTI | 697 |
| | CAASGFTFSDHYMSWVRQAP | | TCQASQDISNYLNWYQQKPG | |
| | GKGLEWVSIIYPDGKTYYADS | | KAPKLLIYGASTLQSGVPSRF | |
| | VKGRFTISRDNSKNTLYLQMN | | SGSGSGTDFTLTISSLQPEDFA | |
| | SLRAEDTAVYYCAREGSYGD | | TYYCQQSYSTPWTFGQGTKL | |
| | YDGMDVWGQGTTVTVSS | | EIKR | |
| 82 | QVQLVQSGAEVKKPGSSVKV | 676 | EIVMTQSPATLSVSPGERATL | 698 |
| | SCKASGGTFSNYDISWVRQAP | | SCRASQSVSSYLAWYQQKPG | |
| | GQGLEWMGGIIPIFGTANYAQ | | QAPRLLIYGASTRATGIPARFS | |
| | KFQGRVTITADESTSTAYMEL | | GSGSGTEFTLTISSLQSEDFAV | |
| | SSLRSEDTAVYYCAREAEEGG | | YYCQQYAFSPITFGQGTKLEI | |
| | WFDPWGQGTLVTVSS | | KR | |
| 83 | QVQLVQSGAEVKKPGASVKV | 677 | DIQMTQSPSSLSASVGDRVTI | 699 |
| | SCKASGYTFTDYYMHWVRQA | | TCRVSQGISSYLNWYQQKPG | |
| | PGQGLEWMGWMNPNSGYTA | | KAPKLLIYDASNLETGVPSRF | |
| | YAQKFQGRVTMTRDTSTSTV | | SGSGSGTDFTLTISSLQPEDFA | |
| | YMELSSLRSEDTAVYYCAKD | | TYYCQQSYSTPLTFGGGTKV | |
| | TPGSGWSSGMDVWGQGTTVT | | EIKR | |
| | VSS | | | |
| 84 | QVQLVQSGAEVKKPGASVKV | 678 | DIQMTQSPSSLSASVGDRVTI | 700 |
| | SCKASGGTFSNYAISWVRQAP | | TCRASQSISSWLAWYQQKPG | |
| | GQGLEWMGWINPNSGGTNYA | | KAPKLLIYDASNLETGVPSRF | |
| | QKFQGRVTMTRDTSTSTVYM | | SGSGSGTDFTLTISSLQPEDFA | |
| | ELSSLRSEDTAVYYCARVGYY | | TYYCLQTHSFPLTFGPGTKVD | |
| | DSSGGGMDVWGQGTTVTVSS | | IKR | |
| 85 | QVQLVQSGAEVKKPGASVKV | 679 | DIQMTQSPSSLSASVGDRVTI | 701 |
| | SCKASGYTFTGYYMHWVRQA | | TCRASQSVSNWLAWYQQKP | |
| | PGQGLEWMGIINPIGGLTTYA | | GKAPKLLIYDASNLQTGVPSR | |
| | QKFQGRVTMTRDTSTSTVYM | | FSGSGSGTDFTLTISSLQPEDF | |
| | ELSSLRSEDTAVYYCASGAYG | | ATYYCQQANSFPLTFGGGTK | |
| | DYVDWYFDLWGRGTLVTVSS | | LEIKR | |
| 86 | QVQLVQSGAEVKKPGASVKV | 680 | DIVMTQSPLSLPVTPGEPASIS | 702 |
| | SCKASGYTFTTYGISWVRQAP | | CRSSRSLLHSNGYNYLDWYL | |
| | GQGLEWMGWINPNSGDTNYA | | QKPGQSPQLLIYLGSYRASGV | |
| | QKFQGRVTMTRDTSTSTVYM | | PDRFSGSGSGTDFTLKISRVE | |
| | ELSSLRSEDTAVYYCARLTTA | | AEDVGVYYCMQGTHWPPTF | |
| | TDSFDLWGRGTLVTVSS | | GQGTKLEIKR | |
| 87 | QVQLVQSGAEVKKPGASVKV | 681 | DIQMTQSPSSLSASVGDRVTI | 703 |
| | SCKASGYSFTNYYIHWVRQAP | | TCZASQSISSYLNWYQQKPG | |
| | GQGLEWMGWMNPYTGQTGY | | KAPKLLIYDASNLETGVPSRF | |
| | AQKFQGRVTMTRDTSTSTVY | | SGSGSGTDFTLTISSLQPEDFA | |
| | MELSSLRSEDTAVYYCTTDEE | | TYYCQQANTFPITFGQGTRLE | |
| | TMDFHLWGRGTLVTVSS | | IKR | |
| 88 | QVQLVQSGAEVKKPGASVKV | 682 | DIVMTQSPLSLPVTPGEPASIS | 704 |
| | SCKASGYTFTGYHIHWVRQAP | | CRSSRSLLHSNGYNYLDWYL | |
| | GQGLEWMGRINPNSGGTDYA | | QKPGQSPQLLIYLGSDRASGV | |
| | QKFQGRVTMTRDTSTSTVYM | | PDRFSGSGSGTDFTLKISRVE | |
| | ELSSLRSEDTAVYYCARETYS | | AEDVGVYYCMQGTHWPPTF | |
| | GSYEESFDYWGQGTLVTVSS | | GQGTKVEIKR | |

### Example 4: Flow Cytometry (FACS)

[1244] For CD33. Jurkat cells were engineered to stably express either the huCD33-R69 or huCD33-G69 variant at >200,000 receptors per cell. Parental, huCD33-R69, and huCD33-G69 Jurkat cell lines were stained with differing levels of CellTrace Violet Cell Proliferation Kit (ThermoFisher, cat. #C34557) to barcode each cell line. Barcoded Jurkat cell lines were fixed with paraformaldehyde and incubated with myc-labeled scFv periplasmic extracts and a secondary anti-myc PE-conjugated monoclonal antibody. Appropriate positive and negative controls were used. Stained cells were analyzed by flow cytometry (CytoFLEX, Beckman Coulter, Inc.) and binding was assessed by change in PE mean fluorescence intensity (MFI) of the barcoded cell populations.

[1245] For FLT3, Ramos cells were engineered to stably express either the huFLT3-T227 or huFLT3-M227 variant at >200,000 receptors per cell. Parental, huFLT3-T227, and huFLT3-M227 Ramos cell lines were stained with differing levels of CellTrace Violet Cell Proliferation Kit (ThermoFisher, cat. #C34557) to barcode each cell line. Barcoded Ramos cell lines were fixed with paraformaldehyde and incubated with myc-labeled scFv periplasmic extracts and a secondary anti-myc PE-conjugated monoclonal antibody. Appropriate positive and negative controls were used. Stained cells were analyzed by flow cytometry (CytoFLEX, Beckman Coulter, Inc.) and binding was assessed by change in PE mean fluorescence intensity (MFI) of the barcoded cell populations.

[1246] Results from this assay for CD33 are shown in Table 8a, reporting fold change over parental as (−), indicating <2 fold; (+), indicating 2-10 fold; (++), indicating 10-30 fold; and (+++), indicating >30 fold. Data are also visualized in FIGS. 2 and 3.

TABLE 8a
Polypeptide Selectivity - CD33

| | CD33 G69 | CD33 R69 |
|---|---|---|
| | Geometric Mean | Geometric Mean |
| | Fold Change over | Fold Change over |
| Polypeptide No. | Jurkat Parental | Jurkat Parental |
| 1 | − | +++ |
| 2 | − | ++ |
| 3 | − | +++ |
| 4 | − | +++ |
| 5 | − | +++ |
| 6 | − | +++ |
| 7 | − | ++ |
| 8 | − | ++ |
| 9 | − | + |
| 10 | − | + |
| 11 | − | + |
| 12 | − | + |
| 13 | − | ++ |
| 14 | − | +++ |
| 15 | − | + |
| 16 | − | + |
| 17 | − | + |
| 18 | − | + |
| 19 | − | +++ |
| 20 | − | ++ |
| 21 | − | + |
| 22 | − | + |
| 23 | − | + |
| 24 | − | +++ |
| 25 | − | +++ |
| 26 | + | − |
| 27 | + | − |
| 28 | ++ | − |
| 29 | + | − |
| 30 | ++ | − |
| 31 | ++ | − |
| 32 | ++ | − |
| 33 | +++ | − |
| 34 | + | − |
| 35 | + | − |
| 36 | + | − |
| 37 | + | − |
| 38 | +++ | − |
| 39 | ++ | − |
| 40 | ++ | − |
| 41 | + | − |
| 42 | ++ | − |

[1247] The foregoing methods may be adapted to demonstrate the binding and polymorphic selectivity of other scFvs against antigens such as cancer antigens. For example, the methods are expected to demonstrate anti-FLT3 scFvs that selectively bind either the T227 or T227M polymorphism.

### Example 5: Bio-Layer Interferometry (BLI)

[1248] Discovered scFvs were analyzed for binding to huCD33-R69-His or huCD33-G69-Fc recombinant proteins (for anti-CD33 scFvs; for CLL-1 scFvs, huCLL1-K244-Avi-Tev-His or huCLL1-Q244-Avi-Tev-His were used; for FLT3, huFLT3-T227-His or huFLT3-M227-Fc were used) using BLI on a ForteBio Octet HTX instrument. Streptavidin-coated biosensors were loaded with biotinylated anti-V5 tag monoclonal antibody for 5 min and were then quenched and blocked with 20 μM amine-PEG2-Biotin for 5 min. scFvs were captured on biosensors from scFv clone periplasmic extracts. huCD33 (or huCLL-1, or huFLT3) proteins were then associated with the captured scFvs for 2 minutes, followed by dissociation with buffer (1×HBST [10 mM HEPES pH 7.4, 150 mM NaCl, 0.05% Tween-20], 1 g/L BSA) for 5 minutes. Data was buffer referenced subtracted against a negative control scFv and report points were collected at a time point (115-sec or 119-sec) just before the end of the association step to assess yes/no binding. Data was fitted with 1:1 Langmuir equation and off-rate values were reported.

[1249] Results from this assay for CD33 are shown in Table 9a, reporting binding, no binding, or ambiguous.

TABLE 9a
Polypeptide Selectivity - CD33

| | CD33 R69 | CD33 G69 |
|---|---|---|
| Polypeptide No. | BLI/Octet Binding | BLI/Octet Binding |
| 1 | Yes | No |
| 2 | Yes | No |
| 3 | Yes | No |
| 4 | Yes | No |
| 5 | Yes | No |
| 6 | Yes | No |
| 7 | Yes | No |
| 8 | Yes | No |
| 9 | Yes | No |
| 10 | Yes | No |
| 11 | Yes | No |
| 12 | Yes | No |
| 13 | Yes | No |
| 14 | Yes | No |
| 15 | Yes | No |
| 16 | Yes | No |
| 17 | Yes | No |
| 18 | Yes | No |
| 19 | Yes | No |
| 20 | Yes | No |
| 21 | Yes | No |
| 22 | Yes | No |
| 23 | Yes | No |
| 24 | Yes | No |
| 25 | Yes | No |
| 26 | No | Yes |
| 27 | No | Yes |
| 28 | No | Yes |
| 29 | No | Yes |
| 30 | No | Yes |
| 31 | No | Yes |
| 32 | No | Yes |
| 33 | No | Yes |
| 34 | No | Yes |
| 35 | No | Yes |
| 36 | No | Yes |
| 37 | No | Yes |
| 38 | No | Yes |
| 39 | No | Yes |
| 40 | No | Yes |
| 41 | No | Yes |
| 42 | No | Yes |

[1250] Analogous methods were used to assess selectivity of binding of polypeptides to CLL-1 K244 or CLL-1 Q244. Results from this assay are shown in Table 9b, reporting binding, no binding, or ambiguous.

TABLE 9b
Polypeptide Selectivity - CLL-1

| | CLL-1 K244 | CLL-1 Q244 |
|---|---|---|
| Polypeptide No. | BLI/Octet Binding | BLI/Octet Binding |
| 43 | Yes | No |
| 44 | Yes | No |
| 45 | Yes | No |
| 46 | Yes | No |
| 47 | Yes | No |
| 48 | Yes | No |
| 49 | Yes | No |
| 50 | Yes | No |
| 51 | Yes | No |
| 52 | Yes | No |
| 53 | Yes | No |
| 54 | Yes | No |
| 55 | Yes | No |
| 56 | Yes | No |
| 57 | Yes | No |
| 58 | Yes | No |
| 59 | Yes | No |
| 60 | Yes | No |
| 61 | Yes | No |
| 62 | Yes | No |
| 63 | Yes | No |
| 64 | Yes | No |
| 65 | Yes | No |
| 66 | Yes | No |
| 67 | No | Yes |
| 68 | No | Yes |
| 69 | No | Yes |
| 70 | No | Yes |
| 71 | No | Yes |
| 72 | No | Yes |
| 73 | No | Yes |
| 74 | No | Yes |
| 75 | No | Yes |
| 76 | No | Yes |
| 77 | No | Yes |
| 78 | No | Yes |
| 79 | No | Yes |
| 80 | No | Yes |
| 81 | No | Yes |
| 82 | No | Yes |
| 83 | No | Yes |
| 84 | No | Yes |
| 85 | No | Yes |
| 86 | No | Yes |
| 87 | No | Yes |
| 88 | No | Yes |

### Example 6: Chimeric Antigen Receptors Comprising ScFvs

[1251] Below in Tables 10 and Table 11 are provided examples of chimeric antigen receptors comprising scFvs as disclosed herein that may be constructed and expressed in immune effector cells according to methods known in the art and disclosed herein (CAR Examples 1-60). Tables 10 and 11 are intended to provide examples of how CARs comprising the V_{H} and V_{L} chains of the scFvs disclosed herein may be constructed. Further CARs may be constructed from other scFv V_{H} and V_{L} chains disclosed herein.

[1252] The CARs in Table 10 below are of the form:
[1253]
   |-[(signal)(scFv V_{H})(linker)(scFv V_{L})(hinge)(TMD)(costim)(effector)]-|+ (tag)
   or
[1254]
   |-[(signal)(scFv V_{L})(linker)(scFv V_{H})(hinge)(TMD)(costim)(effector)]-|+ (tag),
   wherein:
[1255] the CD8a signal sequence MALPVTALLLPLALLLHAARP has SEQ ID NO: 1521, or alternatively, one of SEQ ID NO.s 1522-1525 may be used;
[1256] the (GGGGS)₄ linker has SEQ ID NO: 1536, or alternatively, one of SEQ ID NO.s 1532-1535 may be used;
[1257] the CD8 hinge sequence TTTPAPRPPTPAPTIASQPLSLRPEACRPAAGGAVHTR GLDFACD has SEQ ID NO: 1526;
[1258] the CD28 transmembrane domain sequence FWVLVVVGGVLACYSLLVTVAFIIFWV has SEQ ID NO: 1527;
[1259] the CD28 costim domain sequence RSKRSRLLHSDYMNMTPRRPGPTRKHYQPYAP PRDFAAYRS has SEQ ID NO: 1530;
[1260] the 4-1BB costim domain sequence KRGRKKLLYIFKQPFMRPVQTTQEEDGCSCRF PEEEEGGCEL has SEQ ID NO: 1529;
[1261] the CD3z effector domain sequence RVKFSRSADAPAYKQGQNQLYNELNLGRREE YDVLDKRRGRDPEMGGKPRRKNPQEGLYNELQKDKMAEAYSEIGMKGERRRG KGHDGLYQGLSTATKDTYDALHMQALPPR has SEQ ID NO: 1531;
[1262] P2A sequence GSGATNFSLLKQAGDVEENPGP has SEQ ID NO: 1532;
[1263] the CD34 tag sequence MPRGWTALCLLSLLPSGFMSLDNNGTATPELPTQGTFSNV STNVSYQETTTPSTLGSTSLHPVSQHGNEATTNITETTVKFTSTSVITSVYGNTNSS VQSQTSVISTVFTTPANVSTPETTLKPSLSPGNVSDLSTTSTSLATSPTKPYTSSSPI LSDIKAEIKCSGIREVKLTQGICLEQNKTSSCAEFKKDRGEGLARVLCGEEQADA DAGAQVCSLLLAQSEVRPQCLLLVLANRTEISSKLQLMKKHQSDLKKLGILDFTE QDVASHQSYSQKTLIALVTSGALLAVLGITGYFLMNRRSWSPI has SEQ ID NO: 1537, or alternatively, a variant or truncated CD34 sequence may be used;
[1264] the V_{H} and V_{L} domains of Ex.s 1-3 and 31-33, are from Polypeptide 1, e.g., SEQ ID NO: 151 and SEQ ID NO: 176, respectively;
[1265] the V_{H} and V_{L} domains of Ex.s 4-6 and 34-36, are from Polypeptide 5, e.g., SEQ ID NO: 155 and SEQ ID NO: 180, respectively;
[1266] the V_{H} and V_{L} domains of Ex.s 7-9 and 37-39, are from Polypeptide 6, e.g., SEQ ID NO: 156 and SEQ ID NO: 181, respectively;
[1267] the V_{H} and V_{L} domains of Ex.s 10-12 and 40-42, are from Polypeptide 7, e.g., SEQ ID NO: 157 and SEQ ID NO: 182, respectively;
[1268] the V_{H} and V_{L} domains of Ex.s 13-15 and 43-45, are from Polypeptide 25, e.g., SEQ ID NO: 175 and SEQ ID NO: 200, respectively;
[1269] the V_{H} and V_{L} domains of Ex.s 16-18 and 46-48, are from Polypeptide 30, e.g., SEQ ID NO: 307 and SEQ ID NO: 324, respectively;
[1270] the V_{H} and V_{L} domains of Ex.s 19-21 and 49-51, are from Polypeptide 31, e.g., SEQ ID NO: 308 and SEQ ID NO: 325, respectively;
[1271] the V_{H} and V_{L} domains of Ex.s 22-24 and 52-54, are from Polypeptide 32, e.g., SEQ ID NO: 309 and SEQ ID NO: 326, respectively;
[1272] the V_{H} and V_{L} domains of Ex.s 25-27 and 55-57, are from Polypeptide 33, e.g., SEQ ID NO: 310 and SEQ ID NO: 337, respectively; and
[1273] the V_{H} and V_{L} domains of Ex.s 28-30 and 58-60, are from Polypeptide 38, e.g., SEQ ID NO: 315 and SEQ ID NO: 332, respectively.

TABLE 10
CAR Constructs

| | CD8a | VH or | (GGGGS)⁴ | VH or | CD8 | CD28 | CD28 | 4-1BB | CD3z |
|---|---|---|---|---|---|---|---|---|---|
| | Signal | VL | Linker | VL | Hinge | TMD | CoStim | CoStim | Effector |
| CAR | SEQ | SEQ ID | SEQ ID | SEQ ID | SEQ | SEQ | SEQ | SEQ | SEQ ID |
| Ex. | ID NO | NO | NO | NO | ID NO | ID NO | ID NO | ID NO | NO |
| 1 | 1521 | 151 | 1536 | 176 | 1526 | 1527 | 1530 | — | 1531 |
| 2 | 1521 | 151 | 1536 | 176 | 1526 | 1527 | — | 1529 | 1531 |
| 3 | 1521 | 151 | 1536 | 176 | 1526 | 1527 | 1530 | 1529 | 1531 |
| 4 | 1521 | 155 | 1536 | 180 | 1526 | 1527 | 1530 | — | 1531 |
| 5 | 1521 | 155 | 1536 | 180 | 1526 | 1527 | — | 1529 | 1531 |
| 6 | 1521 | 155 | 1536 | 180 | 1526 | 1527 | 1530 | 1529 | 1531 |
| 7 | 1521 | 156 | 1536 | 181 | 1526 | 1527 | 1530 | — | 1531 |
| 8 | 1521 | 156 | 1536 | 181 | 1526 | 1527 | — | 1529 | 1531 |
| 9 | 1521 | 156 | 1536 | 181 | 1526 | 1527 | 1530 | 1529 | 1531 |
| 10 | 1521 | 157 | 1536 | 182 | 1526 | 1527 | 1530 | — | 1531 |
| 11 | 1521 | 157 | 1536 | 182 | 1526 | 1527 | — | 1529 | 1531 |
| 12 | 1521 | 157 | 1536 | 182 | 1526 | 1527 | 1530 | 1529 | 1531 |
| 13 | 1521 | 175 | 1536 | 200 | 1526 | 1527 | 1530 | — | 1531 |
| 14 | 1521 | 175 | 1536 | 200 | 1526 | 1527 | — | 1529 | 1531 |
| 15 | 1521 | 175 | 1536 | 200 | 1526 | 1527 | 1530 | 1529 | 1531 |
| 16 | 1521 | 307 | 1536 | 324 | 1526 | 1527 | 1530 | — | 1531 |
| 17 | 1521 | 307 | 1536 | 324 | 1526 | 1527 | — | 1529 | 1531 |
| 18 | 1521 | 307 | 1536 | 324 | 1526 | 1527 | 1530 | 1529 | 1531 |
| 19 | 1521 | 308 | 1536 | 325 | 1526 | 1527 | — | 1529 | 1531 |
| 20 | 1521 | 308 | 1536 | 325 | 1526 | 1527 | 1530 | 1529 | 1531 |
| 21 | 1521 | 308 | 1536 | 325 | 1526 | 1527 | 1530 | — | 1531 |
| 22 | 1521 | 309 | 1536 | 326 | 1526 | 1527 | — | 1529 | 1531 |
| 23 | 1521 | 309 | 1536 | 326 | 1526 | 1527 | 1530 | 1529 | 1531 |
| 24 | 1521 | 309 | 1536 | 326 | 1526 | 1527 | 1530 | — | 1531 |
| 25 | 1521 | 310 | 1536 | 327 | 1526 | 1527 | — | 1529 | 1531 |
| 26 | 1521 | 310 | 1536 | 327 | 1526 | 1527 | 1530 | 1529 | 1531 |
| 27 | 1521 | 310 | 1536 | 327 | 1526 | 1527 | 1530 | — | 1531 |
| 28 | 1521 | 315 | 1536 | 332 | 1526 | 1527 | — | 1529 | 1531 |
| 29 | 1521 | 315 | 1536 | 332 | 1526 | 1527 | 1530 | 1529 | 1531 |
| 30 | 1521 | 315 | 1536 | 332 | 1526 | 1527 | 1530 | — | 1531 |
| 31 | 1521 | 176 | 1536 | 151 | 1526 | 1527 | 1530 | | 1531 |
| 32 | 1521 | 176 | 1536 | 151 | 1526 | 1527 | | 1529 | 1531 |
| 33 | 1521 | 176 | 1536 | 151 | 1526 | 1527 | 1530 | 1529 | 1531 |
| 34 | 1521 | 180 | 1536 | 155 | 1526 | 1527 | 1530 | | 1531 |
| 35 | 1521 | 180 | 1536 | 155 | 1526 | 1527 | | 1529 | 1531 |
| 36 | 1521 | 180 | 1536 | 155 | 1526 | 1527 | 1530 | 1529 | 1531 |
| 37 | 1521 | 181 | 1536 | 156 | 1526 | 1527 | 1530 | | 1531 |
| 38 | 1521 | 181 | 1536 | 156 | 1526 | 1527 | | 1529 | 1531 |
| 39 | 1521 | 181 | 1536 | 156 | 1526 | 1527 | 1530 | 1529 | 1531 |
| 40 | 1521 | 182 | 1536 | 157 | 1526 | 1527 | 1530 | | 1531 |
| 41 | 1521 | 182 | 1536 | 157 | 1526 | 1527 | | 1529 | 1531 |
| 42 | 1521 | 182 | 1536 | 157 | 1526 | 1527 | 1530 | 1529 | 1531 |
| 43 | 1521 | 200 | 1536 | 175 | 1526 | 1527 | 1530 | | 1531 |
| 44 | 1521 | 200 | 1536 | 175 | 1526 | 1527 | | 1529 | 1531 |
| 45 | 1521 | 200 | 1536 | 175 | 1526 | 1527 | 1530 | 1529 | 1531 |
| 46 | 1521 | 324 | 1536 | 307 | 1526 | 1527 | 1530 | | 1531 |
| 47 | 1521 | 324 | 1536 | 307 | 1526 | 1527 | | 1529 | 1531 |
| 48 | 1521 | 324 | 1536 | 307 | 1526 | 1527 | 1530 | 1529 | 1531 |
| 49 | 1521 | 325 | 1536 | 308 | 1526 | 1527 | | 1529 | 1531 |
| 50 | 1521 | 325 | 1536 | 308 | 1526 | 1527 | 1530 | 1529 | 1531 |
| 51 | 1521 | 325 | 1536 | 308 | 1526 | 1527 | 1530 | | 1531 |
| 52 | 1521 | 326 | 1536 | 309 | 1526 | 1527 | | 1529 | 1531 |
| 53 | 1521 | 326 | 1536 | 309 | 1526 | 1527 | 1530 | 1529 | 1531 |
| 54 | 1521 | 326 | 1536 | 309 | 1526 | 1527 | 1530 | | 1531 |
| 55 | 1521 | 327 | 1536 | 310 | 1526 | 1527 | | 1529 | 1531 |
| 56 | 1521 | 327 | 1536 | 310 | 1526 | 1527 | 1530 | 1529 | 1531 |
| 57 | 1521 | 327 | 1536 | 310 | 1526 | 1527 | 1530 | | 1531 |
| 58 | 1521 | 332 | 1536 | 315 | 1526 | 1527 | | 1529 | 1531 |
| 59 | 1521 | 332 | 1536 | 315 | 1526 | 1527 | 1530 | 1529 | 1531 |
| 60 | 1521 | 332 | 1536 | 315 | 1526 | 1527 | 1530 | | 1531 |

[1274] Accordingly, provided herein are chimeric antigen receptors comprising the sequences disclosed in the following illustrative examples.

TABLE 11
CAR Sequences

| CAR Ex. | SEQ ID | |
|---|---|---|
| No. | NO. | CAR Sequence |
| 1 | 1539 | MALPVTALLLPLALLLHAARPDIQMTQSPSSLSASVGDRVTITCRASQTINDW |
| | | LAWYQQKPGKAPKLLIYSASTLHSGVPSRFSGSGSGTDFTLTISSLQPEDFATY |
| | | YCQQAYSTPWTFGQGTKVEIKRTTTPAPRPPTPAPTIASQPLSLRPEACRPAA |
| | | GGAVHTRGLDFACDQVQLVQSGAEVKKPGASVKVSCKASGYSFTGYYIHW |
| | | VRQAPGQGLEWMGWINPNSGGTNYAQKFQGRVTMTRDTSTSTVYMELSSL |
| | | RSEDTAVYYCARDQWDGYNSGYFDYWGQGTLVTVSSGGGGSGGGGSGGG |
| | | GSGGGGSFWVLVVVGGVLACYSLLVTVAFIIFWVRSKRSRLLHSDYMNMTP |
| | | RRPGPTRKHYQPYAPPRDFAAYRSRVKFSRSADAPAYKQGQNQLYNELNLG |
| | | RREEYDVLDKRRGRDPEMGGKPRRKNPQEGLYNELQKDKMAEAYSEIGMK |
| | | GERRRGKGHDGLYQGLSTATKDTYDALHMQALPPR |
| 2 | 1540 | MALPVTALLLPLALLLHAARPDIQMTQSPSSLSASVGDRVTITCRASQTINDW |
| | | LAWYQQKPGKAPKLLIYSASTLHSGVPSRFSGSGSGTDFTLTISSLQPEDFATY |
| | | YCQQAYSTPWTFGQGTKVEIKRTTTPAPRPPTPAPTIASQPLSLRPEACRPAA |
| | | GGAVHTRGLDFACDQVQLVQSGAEVKKPGASVKVSCKASGYSFTGYYIHW |
| | | VRQAPGQGLEWMGWINPNSGGTNYAQKFQGRVTMTRDTSTSTVYMELSSL |
| | | RSEDTAVYYCARDQWDGYNSGYFDYWGQGTLVTVSSGGGGSGGGGSGGG |
| | | GSGGGGSFWVLVVVGGVLACYSLLVTVAFIIFWVKRGRKKLLYIFKQPFMRP |
| | | VQTTQEEDGCSCRFPEEEEGGCELRVKFSRSADAPAYKQGQNQLYNELNLG |
| | | RREEYDVLDKRRGRDPEMGGKPRRKNPQEGLYNELQKDKMAEAYSEIGMK |
| | | GERRRGKGHDGLYQGLSTATKDTYDALHMQALPPR |
| 3 | 1541 | MALPVTALLLPLALLLHAARPDIQMTQSPSSLSASVGDRVTITCRASQTINDW |
| | | LAWYQQKPGKAPKLLIYSASTLHSGVPSRFSGSGSGTDFTLTISSLQPEDFATY |
| | | YCQQAYSTPWTFGQGTKVEIKRTTTPAPRPPTPAPTIASQPLSLRPEACRPAA |
| | | GGAVHTRGLDFACDQVQLVQSGAEVKKPGASVKVSCKASGYSFTGYYIHW |
| | | VRQAPGQGLEWMGWINPNSGGTNYAQKFQGRVTMTRDTSTSTVYMELSSL |
| | | RSEDTAVYYCARDQWDGYNSGYFDYWGQGTLVTVSSGGGGSGGGGSGGG |
| | | GSGGGGSFWVLVVVGGVLACYSLLVTVAFIIFWVRSKRSRLLHSDYMNMTP |
| | | RRPGPTRKHYQPYAPPRDFAAYRSKRGRKKLLYIFKQPFMRPVQTTQEEDGC |
| | | SCRFPEEEEGGCELRVKFSRSADAPAYKQGQNQLYNELNLGRREEYDVLDK |
| | | RRGRDPEMGGKPRRKNPQEGLYNELQKDKMAEAYSEIGMKGERRRGKGHD |
| | | GLYQGLSTATKDTYDALHMQALPPR |
| 4 | 1542 | MALPVTALLLPLALLLHAARPDIVMTQSPLSLPVTPGEPASISCRSSQSLLHSN |
| | | GYNYLDWYLQKPGQSPQLLIYLGSDRASGVPDRFSGSGSGTDFTLKISRVEA |
| | | EDVGVYYCMQGLQTPITFGQGTRLEIKRTTTPAPRPPTPAPTIASQPLSLRPEA |
| | | CRPAAGGAVHTRGLDFACDQVQLVQSGAEVKKPGASVKVSCKASGNTFTSY |
| | | GISWVRQAPGQGLEWMGWINPNSGGTKYAQKFQGRVTMTRDTSTSTVYME |
| | | LSSLRSEDTAVYYCARESWFGELYYGMDVWGKGTTVTVSSGGGGSGGGGS |
| | | GGGGSGGGGSFWVLVVVGGVLACYSLLVTVAFIIFWVRSKRSRLLHSDYMN |
| | | MTPRRPGPTRKHYQPYAPPRDFAAYRSRVKFSRSADAPAYKQGQNQLYNEL |
| | | NLGRREEYDVLDKRRGRDPEMGGKPRRKNPQEGLYNELQKDKMAEAYSEI |
| | | GMKGERRRGKGHDGLYQGLSTATKDTYDALHMQALPPR |
| 5 | 1543 | MALPVTALLLPLALLLHAARPDIVMTQSPLSLPVTPGEPASISCRSSQSLLHSN |
| | | GYNYLDWYLQKPGQSPQLLIYLGSDRASGVPDRFSGSGSGTDFTLKISRVEA |
| | | EDVGVYYCMQGLQTPITFGQGTRLEIKRTTTPAPRPPTPAPTIASQPLSLRPEA |
| | | CRPAAGGAVHTRGLDFACDQVQLVQSGAEVKKPGASVKVSCKASGNTFTSY |
| | | GISWVRQAPGQGLEWMGWINPNSGGTKYAQKFQGRVTMTRDTSTSTVYME |
| | | LSSLRSEDTAVYYCARESWFGELYYGMDVWGKGTTVTVSSGGGGSGGGGS |
| | | GGGGSGGGGSFWVLVVVGGVLACYSLLVTVAFIIFWVKRGRKKLLYIFKQPF |
| | | MRPVQTTQEEDGCSCRFPEEEEGGCELRVKFSRSADAPAYKQGQNQLYNEL |
| | | NLGRREEYDVLDKRRGRDPEMGGKPRRKNPQEGLYNELQKDKMAEAYSEI |
| | | GMKGERRRGKGHDGLYQGLSTATKDTYDALHMQALPPR |
| 6 | 1544 | MALPVTALLLPLALLLHAARPDIVMTQSPLSLPVTPGEPASISCRSSQSLLHSN |
| | | GYNYLDWYLQKPGQSPQLLIYLGSDRASGVPDRFSGSGSGTDFTLKISRVEA |
| | | EDVGVYYCMQGLQTPITFGQGTRLEIKRTTTPAPRPPTPAPTIASQPLSLRPEA |
| | | CRPAAGGAVHTRGLDFACDQVQLVQSGAEVKKPGASVKVSCKASGNTFTSY |
| | | GISWVRQAPGQGLEWMGWINPNSGGTKYAQKFQGRVTMTRDTSTSTVYME |
| | | LSSLRSEDTAVYYCARESWFGELYYGMDVWGKGTTVTVSSGGGGSGGGGS |
| | | GGGGSGGGGSFWVLVVVGGVLACYSLLVTVAFIIFWVRSKRSRLLHSDYMN |
| | | MTPRRPGPTRKHYQPYAPPRDFAAYRSKRGRKKLLYIFKQPFMRPVQTTQEE |
| | | DGCCRFPEEEEGGCELRVKFSRSADAPAYKQGQNQLYNELNLGRREEYDV |
| | | LDKRRGRDPEMGGKPRRKNPQEGLYNELQKDKMAEAYSEIGMKGERRRGK |
| | | GHDGLYQGLSTATKDTYDALHMQALPPR |
| 7 | 1545 | MALPVTALLLPLALLLHAARPDIQMTQSPSSLSASVGDRVTITCRASQSISSYL |
| | | NWYQQKPGKAPKLLIYEASTLETGVPSRFSGSGSGTDFTLTISSLQPEDFATY |
| | | YCQQANSFPFTFGPGTKVDIKRTTTPAPRPPTPAPTIASQPLSLRPEACRPAAG |
| | | GAVHTRGLDFACDQVQLVQSGAEVKKPGASVKVSCKASGYTFTAYYTHWV |
| | | RQAPGQGLEWMGWMNPNSGHTSYAQKFQGRVTMTRDTSTSTVYMELSSLR |
| | | SEDTAVYYCAREAYDSFDYWGQGTLVTVSSGGGGSGGGGSGGGGSGGGGS |
| | | FWVLVVVGGVLACYSLLVTVAFIIFWVRSKRSRLLHSDYMNMTPRRPGPTR |
| | | KHYQPYAPPRDFAAYRSRVKFSRSADAPAYKQGQNQLYNELNLGRREEYDV |
| | | LDKRRGRDPEMGGKPRRKNPQEGLYNELQKDKMAEAYSEIGMKGERRRGK |
| | | GHDGLYQGLSTATKDTYDALHMQALPPR |
| 8 | 1546 | MALPVTALLLPLALLLHAARPDIQMTQSPSSLSASVGDRVTITCRASQSISSYL |
| | | NWYQQKPGKAPKLLIYEASTLETGVPSRFSGSGSGTDFTLTISSLQPEDFATY |
| | | YCQQANSFPFTFGPGTKVDIKRTTTPAPRPPTPAPTIASQPLSLRPEACRPAAG |
| | | GAVHTRGLDFACDQVQLVQSGAEVKKPGASVKVSCKASGYTFTAYYTHWV |
| | | RQAPGQGLEWMGWMNPNSGHTSYAQKFQGRVTMTRDTSTSTVYMELSSLR |
| | | SEDTAVYYCAREAYDSFDYWGQGTLVTVSSGGGGSGGGGSGGGGSGGGGS |
| | | FWVLVVVGGVLACYSLLVTVAFIIFWVKRGRKKLLYIFKQPFMRPVQTTQEE |
| | | DGCSCRFPEEEEGGCELRVKFSRSADAPAYKQGQNQLYNELNLGRREEYDV |
| | | LDKRRGRDPEMGGKPRRKNPQEGLYNELQKDKMAEAYSEIGMKGERRRGK |
| | | GHDGLYQGLSTATKDTYDALHMQALPPR |
| 9 | 1547 | MALPVTALLLPLALLLHAARPDIQMTQSPSSLSASVGDRVTITCRASQSISSYL |
| | | NWYQQKPGKAPKLLIYEASTLETGVPSRFSGSGSGTDFTLTISSLQPEDFATY |
| | | YCQQANSFPFTFGPGTKVDIKRTTTPAPRPPTPAPTIASQPLSLRPEACRPAAG |
| | | GAVHTRGLDFACDQVQLVQSGAEVKKPGASVKVSCKASGYTFTAYYTHWV |
| | | RQAPGQGLEWMGWMNPNSGHTSYAQKFQGRVTMTRDTSTSTVYMELSSLR |
| | | SEDTAVYYCAREAYDSFDYWGQGTLVTVSSGGGGSGGGGSGGGGSGGGGS |
| | | FWVLVVVGGVLACYSLLVTVAFIIFWVRSKRSRLLHSDYMNMTPRRPGPTR |
| | | KHYQPYAPPRDFAAYRSKRGRKKLLYIFKQPFMRPVQTTQEEDGCSCRFPEE |
| | | EEGGCELRVKFSRSADAPAYKQGQNQLYNELNLGRREEYDVLDKRRGRDPE |
| | | MGGKPRRKNPQEGLYNELQKDKMAEAYSEIGMKGERRRGKGHDGLYQGLS |
| | | TATKDTYDALHMQALPPR |
| 10 | 1548 | MALPVTALLLPLALLLHAARPDIQMTQSPSSLSASVGDRVTITCRASRGINNW |
| | | LTWYQQKPGKAPKLLIYGASSLQSGVPSRFSGSGSGTDFTLTISSLQPEDFATY |
| | | YCQQSYRIPYTFGQGTKLEIKRTTTPAPRPPTPAPTIASQPLSLRPEACRPAAG |
| | | GAVHTRGLDFACDQVQLVQSGAEVKKPGASVKVSCKASGYTFTDYYMHW |
| | | VRQAPGQGLEWMGWINPNSGGTNYAQKFQGRVTMTRDTSTSTVYMELSSL |
| | | RSEDTAVYYCARDSRIAVAASSFDYWGQGTLVTVSSGGGGSGGGGSGGGGS |
| | | GGGGSFWVLVVVGGVLACYSLLVTVAFIIFWVRSKRSRLLHSDYMNMTPRR |
| | | PGPTRKHYQPYAPPRDFAAYRSRVKFSRSADAPAYKQGQNQLYNELNLGRR |
| | | EEYDVLDKRRGRDPEMGGKPRRKNPQEGLYNELQKDKMAEAYSEIGMKGE |
| | | RRRGKGHDGLYQGLSTATKDTYDALHMQALPPR |
| 11 | 1549 | MALPVTALLLPLALLLHAARPDIQMTQSPSSLSASVGDRVTITCRASRGINNW |
| | | LTWYQQKPGKAPKLLIYGASSLQSGVPSRFSGSGSGTDFTLTISSLQPEDFATY |
| | | YCQQSYRIPYTFGQGTKLEIKRTTTPAPRPPTPAPTIASQPLSLRPEACRPAAG |
| | | GAVHTRGLDFACDQVQLVQSGAEVKKPGASVKVSCKASGYTFTDYYMHW |
| | | VRQAPGQGLEWMGWINPNSGGTNYAQKFQGRVTMTRDTSTSTVYMELSSL |
| | | RSEDTAVYYCARDSRIAVAASSFDYWGQGTLVTVSSGGGGSGGGGSGGGGS |
| | | GGGGSFWVLVVVGGVLACYSLLVTVAFIIFWVKRGRKKLLYIFKQPFMRPV |
| | | QTTQEEDGCSCRFPEEEEGGCELRVKFSRSADAPAYKQGQNQLYNELNLGRR |
| | | EEYDVLDKRRGRDPEMGGKPRRKNPQEGLYNELQKDKMAEAYSEIGMKGE |
| | | RRRGKGHDGLYQGLSTATKDTYDALHMQALPPR |
| 12 | 1550 | MALPVTALLLPLALLLHAARPDIQMTQSPSSLSASVGDRVTITCRASRGINNW |
| | | LTWYQQKPGKAPKLLIYGASSLQSGVPSRFSGSGSGTDFTLTISSLQPEDFATY |
| | | YCQQSYRIPYTFGQGTKLEIKRTTTPAPRPPTPAPTIASQPLSLRPEACRPAAG |
| | | GAVHTRGLDFACDQVQLVQSGAEVKKPGASVKVSCKASGYTFTDYYMHW |
| | | VRQAPGQGLEWMGWINPNSGGTNYAQKFQGRVTMTRDTSTSTVYMELSSL |
| | | RSEDTAVYYCARDSRIAVAASSFDYWGQGTLVTVSSGGGGSGGGGSGGGGS |
| | | GGGGSFWVLVVVGGVLACYSLLVTVAFIIFWVRSKRSRLLHSDYMNMTPRR |
| | | PGPTRKHYQPYAPPRDFAAYRSKRGRKKLLYIFKQPFMRPVQTTQEEDGCSC |
| | | RFPEEEEGGCELRVKFSRSADAPAYKQGQNQLYNELNLGRREEYDVLDKRR |
| | | GRDPEMGGKPRRKNPQEGLYNELQKDKMAEAYSEIGMKGERRRGKGHDGL |
| | | YQGLSTATKDTYDALHMQALPPR |
| 13 | 1551 | MALPVTALLLPLALLLHAARPDIQMTQSPSSLSASVGDRVTITCRASQSINDW |
| | | LAWYQQKPGKAPKLLIYAASNLQSGVPSRFSGSGSGTDFTLTISSLQPEDFAT |
| | | YYCQQGYSTPPTFGQGTKVEIKRTTTPAPRPPTPAPTIASQPLSLRPEACRPAA |
| | | GGAVHTRGLDFACDQVQLVQSGAEVKKPGASVKVSCKASGYTFTGYYMH |
| | | WVRQAPGQGLEWMGRINPNGGSTTYAQKFQGRVTMTRDTSTSTVYMELSS |
| | | LRSEDTAVYYCARDDFYYYYLDFWGKGTTVTVSSGGGGSGGGGSGGGGSG |
| | | GGGSFWVLVVVGGVLACYSLLVTVAFIIFWVRSKRSRLLHSDYMNMTPRRP |
| | | GPTRKHYQPYAPPRDFAAYRSRVKFSRSADAPAYKQGQNQLYNELNLGRRE |
| | | EYDVLDKRRGRDPEMGGKPRRKNPQEGLYNELQKDKMAEAYSEIGMKGER |
| | | RRGKGHDGLYQGLSTATKDTYDALHMQALPPR |
| 14 | 1552 | MALPVTALLLPLALLLHAARPDIQMTQSPSSLSASVGDRVTITCRASQSINDW |
| | | LAWYQQKPGKAPKLLIYAASNLQSGVPSRFSGSGSGTDFTLTISSLQPEDFAT |
| | | YYCQQGYSTPPTFGQGTKVEIKRTTTPAPRPPTPAPTIASQPLSLRPEACRPAA |
| | | GGAVHTRGLDFACDQVQLVQSGAEVKKPGASVKVSCKASGYTFTGYYMH |
| | | WVRQAPGQGLEWMGRINPNGGSTTYAQKFQGRVTMTRDTSTSTVYMELSS |
| | | LRSEDTAVYYCARDDFYYYYLDFWGKGTTVTVSSGGGGSGGGGSGGGGSG |
| | | GGGSFWVLVVVGGVLACYSLLVTVAFIIFWVKRGRKKLLYIFKQPFMRPVQT |
| | | TQEEDGCSCRFPEEEEGGCELRVKFSRSADAPAYKQGQNQLYNELNLGRREE |
| | | YDVLDKRRGRDPEMGGKPRRKNPQEGLYNELQKDKMAEAYSEIGMKGERR |
| | | RGKGHDGLYQGLSTATKDTYDALHMQALPPR |
| 15 | 1553 | MALPVTALLLPLALLLHAARPDIQMTQSPSSLSASVGDRVTITCRASQSINDW |
| | | LAWYQQKPGKAPKLLIYAASNLQSGVPSRFSGSGSGTDFTLTISSLQPEDFAT |
| | | YYCQQGYSTPPTFGQGTKVEIKRTTTPAPRPPTPAPTIASQPLSLRPEACRPAA |
| | | GGAVHTRGLDFACDQVQLVQSGAEVKKPGASVKVSCKASGYTFTGYYMH |
| | | WVRQAPGQGLEWMGRINPNGGSTTYAQKFQGRVTMTRDTSTSTVYMELSS |
| | | LRSEDTAVYYCARDDFYYYYLDFWGKGTTVTVSSGGGGSGGGGSGGGGSG |
| | | GGGSFWVLVVVGGVLACYSLLVTVAFIIFWVRSKRSRLLHSDYMNMTPRRP |
| | | GPTRKHYQPYAPPRDFAAYRSKRGRKKLLYIFKQPFMRPVQTTQEEDGCSCR |
| | | FPEEEEGGCELRVKFSRSADAPAYKQGQNQLYNELNLGRREEYDVLDKRRG |
| | | RDPEMGGKPRRKNPQEGLYNELQKDKMAEAYSEIGMKGERRRGKGHDGLY |
| | | QGLSTATKDTYDALHMQALPPR |
| 16 | 1554 | MALPVTALLLPLALLLHAARPDIQMTQSPSSLSASVGDRVTITCRASQSISSW |
| | | LAWYQQKPGKAPKLLIYGASSLQSGVPSRFSGSGSGTDFTLTISSLQPEDFAT |
| | | YYCQQTYRTPLTFGPGTKVDIKRTTTPAPRPPTPAPTIASQPLSLRPEACRPAA |
| | | GGAVHTRGLDFACDQVQLVQSGAEVKKPGASVKVSCKASGYTFSNYYMH |
| | | WVRQAPGQGLEWMGWMNPDSGTTGYAQKFQGRVTMTRDTSTSTVYMELS |
| | | SLRSEDTAVYYCVRDGTMVQGIFDYWGQGTLVTVSSGGGGSGGGGSGGGG |
| | | SGGGGSFWVLVVVGGVLACYSLLVTVAFIIFWVRSKRSRLLHSDYMNMTPR |
| | | RPGPTRKHYQPYAPPRDFAAYRSRVKFSRSADAPAYKQGQNQLYNELNLGR |
| | | REEYDVLDKRRGRDPEMGGKPRRKNPQEGLYNELQKDKMAEAYSEIGMKG |
| | | ERRRGKGHDGLYQGLSTATKDTYDALHMQALPPR |
| 17 | 1555 | MALPVTALLLPLALLLHAARPDIQMTQSPSSLSASVGDRVTITCRASQSISSW |
| | | LAWYQQKPGKAPKLLIYGASSLQSGVPSRFSGSGSGTDFTLTISSLQPEDFAT |
| | | YYCQQTYRTPLTFGPGTKVDIKRTTTPAPRPPTPAPTIASQPLSLRPEACRPAA |
| | | GGAVHTRGLDFACDQVQLVQSGAEVKKPGASVKVSCKASGYTFSNYYMH |
| | | WVRQAPGQGLEWMGWMNPDSGTTGYAQKFQGRVTMTRDTSTSTVYMELS |
| | | SLRSEDTAVYYCVRDGTMVQGIFDYWGQGTLVTVSSGGGGSGGGGSGGGG |
| | | SGGGGSFWVLVVVGGVLACYSLLVTVAFIIFWVKRGRKKLLYIFKQPFMRPV |
| | | QTTQEEDGCSCRFPEEEEGGCELRVKFSRSADAPAYKQGQNQLYNELNLGRR |
| | | EEYDVLDKRRGRDPEMGGKPRRKNPQEGLYNELQKDKMAEAYSEIGMKGE |
| | | RRRGKGHDGLYQGLSTATKDTYDALHMQALPPR |
| 18 | 1556 | MALPVTALLLPLALLLHAARPDIQMTQSPSSLSASVGDRVTITCRASQSISSW |
| | | LAWYQQKPGKAPKLLIYGASSLQSGVPSRFSGSGSGTDFTLTISSLQPEDFAT |
| | | YYCQQTYRTPLTFGPGTKVDIKRTTTPAPRPPTPAPTIASQPLSLRPEACRPAA |
| | | GGAVHTRGLDFACDQVQLVQSGAEVKKPGASVKVSCKASGYTFSNYYMH |
| | | WVRQAPGQGLEWMGWMNPDSGTTGYAQKFQGRVTMTRDTSTSTVYMELS |
| | | SLRSEDTAVYYCVRDGTMVQGIFDYWGQGTLVTVSSGGGGSGGGGSGGGG |
| | | SGGGGSFWVLVVVGGVLACYSLLVTVAFIIFWVRSKRSRLLHSDYMNMTPR |
| | | RPGPTRKHYQPYAPPRDFAAYRSKRGRKKLLYIFKQPFMRPVQTTQEEDGCS |
| | | CRFPEEEEGGCELRVKFSRSADAPAYKQGQNQLYNELNLGRREEYDVLDKR |
| | | RGRDPEMGGKPRRKNPQEGLYNELQKDKMAEAYSEIGMKGERRRGKGHDG |
| | | LYQGLSTATKDTYDALHMQALPPR |
| 19 | 1557 | MALPVTALLLPLALLLHAARPDIQMTQSPSSLSASVGDRVTITCRASQGIGND |
| | | LGWYQQKPGKAPKLLIYGASSVQSGVPSRFSGSGSGTDFTLTISSLQPEDFAT |
| | | YYCQQSYSTPITFGQGTRLEIKRTTTPAPRPPTPAPTIASQPLSLRPEACRPAAG |
| | | GAVHTRGLDFACDQVQLVQSGAEVKKPGSSVKVSCKASGGTFSTYAITWVR |
| | | QAPGQGLEWMGGIIPIVGRANYAQKFQGRVTITADESTSTAYMELSSLRSED |
| | | TAVYYCARSGGHDLDYWGQGTLVTVSSGGGGSGGGGSGGGGSGGGGSFW |
| | | VLVVVGGVLACYSLLVTVAFIIFWVKRGRKKLLYIFKQPFMRPVQTTQEEDG |
| | | CSCRFPEEEEGGCELRVKFSRSADAPAYKQGQNQLYNELNLGRREEYDVLD |
| | | KRRGRDPEMGGKPRRKNPQEGLYNELQKDKMAEAYSEIGMKGERRRGKGH |
| | | DGLYQGLSTATKDTYDALHMQALPPR |
| 20 | 1558 | MALPVTALLLPLALLLHAARPDIQMTQSPSSLSASVGDRVTITCRASQGIGND |
| | | LGWYQQKPGKAPKLLIYGASSVQSGVPSRFSGSGSGTDFTLTISSLQPEDFAT |
| | | YYCQQSYSTPITFGQGTRLEIKRTTTPAPRPPTPAPTIASQPLSLRPEACRPAAG |
| | | GAVHTRGLDFACDQVQLVQSGAEVKKPGSSVKVSCKASGGTFSTYAITWVR |
| | | QAPGQGLEWMGGIIPIVGRANYAQKFQGRVTITADESTSTAYMELSSLRSED |
| | | TAVYYCARSGGHDLDYWGQGTLVTVSSGGGGSGGGGSGGGGSGGGGSFW |
| | | VLVVVGGVLACYSLLVTVAFIIFWVRSKRSRLLHSDYMNMTPRRPGPTRKH |
| | | YQPYAPPRDFAAYRSKRGRKKLLYIFKQPFMRPVQTTQEEDGCSCRFPEEEE |
| | | GGCELRVKFSRSADAPAYKQGQNQLYNELNLGRREEYDVLDKRRGRDPEM |
| | | GGKPRRKNPQEGLYNELQKDKMAEAYSEIGMKGERRRGKGHDGLYQGLST |
| | | ATKDTYDALHMQALPPR |
| 21 | 1559 | MALPVTALLLPLALLLHAARPDIQMTQSPSSLSASVGDRVTITCRASQGIGND |
| | | LGWYQQKPGKAPKLLIYGASSVQSGVPSRFSGSGSGTDFTLTISSLQPEDFAT |
| | | YYCQQSYSTPITFGQGTRLEIKRTTTPAPRPPTPAPTIASQPLSLRPEACRPAAG |
| | | GAVHTRGLDFACDQVQLVQSGAEVKKPGSSVKVSCKASGGTFSTYAITWVR |
| | | QAPGQGLEWMGGIIPIVGRANYAQKFQGRVTITADESTSTAYMELSSLRSED |
| | | TAVYYCARSGGHDLDYWGQGTLVTVSSGGGGSGGGGSGGGGSGGGGSFW |
| | | VLVVVGGVLACYSLLVTVAFIIFWVRSKRSRLLHSDYMNMTPRRPGPTRKH |
| | | YQPYAPPRDFAAYRSRVKFSRSADAPAYKQGQNQLYNELNLGRREEYDVLD |
| | | KRRGRDPEMGGKPRRKNPQEGLYNELQKDKMAEAYSEIGMKGERRRGKGH |
| | | DGLYQGLSTATKDTYDALHMQALPPR |
| 22 | 1560 | MALPVTALLLPLALLLHAARPEIVMTQSPATLSVSPGERATLSCRASQSVSSS |
| | | YLAWYQQKPGQAPRLLIYATSTRATGIPARFSGSGSGTEFTLTISSLQSEDFAV |
| | | YYCQQYGSLPLTFGQGTKVEIKRTTTPAPRPPTPAPTIASQPLSLRPEACRPAA |
| | | GGAVHTRGLDFACDEVQLLESGGGLVQPGGSLRLSCAASGFTFSSYGMHWV |
| | | RQAPGKGLEWVSSISGSGDTTYYADSVKGRFTISRDNSKNTLYLQMNSLRAE |
| | | DTAVYYCARDNPYGDYGGSFDYWGQGTLVTVSSGGGGSGGGGSGGGGSG |
| | | GGGSFWVLVVVGGVLACYSLLVTVAFIIFWVKRGRKKLLYIFKQPFMRPVQT |
| | | TQEEDGCSCRFPEEEEGGCELRVKFSRSADAPAYKQGQNQLYNELNLGRREE |
| | | YDVLDKRRGRDPEMGGKPRRKNPQEGLYNELQKDKMAEAYSEIGMKGERR |
| | | RGKGHDGLYQGLSTATKDTYDALHMQALPPR |
| 23 | 1561 | MALPVTALLLPLALLLHAARPEIVMTQSPATLSVSPGERATLSCRASQSVSSS |
| | | YLAWYQQKPGQAPRLLIYATSTRATGIPARFSGSGSGTEFTLTISSLQSEDFAV |
| | | YYCQQYGSLPLTFGQGTKVEIKRTTTPAPRPPTPAPTIASQPLSLRPEACRPAA |
| | | GGAVHTRGLDFACDEVQLLESGGGLVQPGGSLRLSCAASGFTFSSYGMHWV |
| | | RQAPGKGLEWVSSISGSGDTTYYADSVKGRFTISRDNSKNTLYLQMNSLRAE |
| | | DTAVYYCARDNPYGDYGGSFDYWGQGTLVTVSSGGGGSGGGGSGGGGSG |
| | | GGGSFWVLVVVGGVLACYSLLVTVAFIIFWVRSKRSRLLHSDYMNMTPRRP |
| | | GPTRKHYQPYAPPRDFAAYRSKRGRKKLLYIFKQPFMRPVQTTQEEDGCSCR |
| | | FPEEEEGGCELRVKFSRSADAPAYKQGQNQLYNELNLGRREEYDVLDKRRG |
| | | RDPEMGGKPRRKNPQEGLYNELQKDKMAEAYSEIGMKGERRRGKGHDGLY |
| | | QGLSTATKDTYDALHMQALPPR |
| 24 | 1562 | MALPVTALLLPLALLLHAARPEIVMTQSPATLSVSPGERATLSCRASQSVSSS |
| | | YLAWYQQKPGQAPRLLIYATSTRATGIPARFSGSGSGTEFTLTISSLQSEDFAV |
| | | YYCQQYGSLPLTFGQGTKVEIKRTTTPAPRPPTPAPTIASQPLSLRPEACRPAA |
| | | GGAVHTRGLDFACDEVQLLESGGGLVQPGGSLRLSCAASGFTFSSYGMHWV |
| | | RQAPGKGLEWVSSISGSGDTTYYADSVKGRFTISRDNSKNTLYLQMNSLRAE |
| | | DTAVYYCARDNPYGDYGGSFDYWGQGTLVTVSSGGGGSGGGGSGGGGSG |
| | | GGGSFWVLVVVGGVLACYSLLVTVAFIIFWVRSKRSRLLHSDYMNMTPRRP |
| | | GPTRKHYQPYAPPRDFAAYRSRVKFSRSADAPAYKQGQNQLYNELNLGRRE |
| | | EYDVLDKRRGRDPEMGGKPRRKNPQEGLYNELQKDKMAEAYSEIGMKGER |
| | | RRGKGHDGLYQGLSTATKDTYDALHMQALPPR |
| 25 | 1563 | MALPVTALLLPLALLLHAARPDIQMTQSPSSLSASVGDRVTITCRASQGISNN |
| | | LNWYQQKPGKAPKLLIYDASNLETGVPSRFSGSGSGTDFTLTISSLQPEDFAT |
| | | YYCQQANSFPLTFGPGTKVDIKRTTTPAPRPPTPAPTIASQPLSLRPEACRPAA |
| | | GGAVHTRGLDFACDQVQLVQSGAEVKKPGASVKVSCKASGYTFTSYYMHW |
| | | VRQAPGQGLEWMGIIDPSGGSTNYAQKFQGRVTMTRDTSTSTVYMELSSLRS |
| | | EDTAVYYCARDYYGSGSYYGLDYWGRGTLVTVSSGGGGSGGGGSGGGGSG |
| | | GGGSFWVLVVVGGVLACYSLLVTVAFIIFWVKRGRKKLLYIFKQPFMRPVQT |
| | | TQEEDGCSCRFPEEEEGGCELRVKFSRSADAPAYKQGQNQLYNELNLGRREE |
| | | YDVLDKRRGRDPEMGGKPRRKNPQEGLYNELQKDKMAEAYSEIGMKGERR |
| | | RGKGHDGLYQGLSTATKDTYDALHMQALPPR |
| 26 | 1564 | MALPVTALLLPLALLLHAARPDIQMTQSPSSLSASVGDRVTITCRASQGISNN |
| | | LNWYQQKPGKAPKLLIYDASNLETGVPSRFSGSGSGTDFTLTISSLQPEDFAT |
| | | YYCQQANSFPLTFGPGTKVDIKRTTTPAPRPPTPAPTIASQPLSLRPEACRPAA |
| | | GGAVHTRGLDFACDQVQLVQSGAEVKKPGASVKVSCKASGYTFTSYYMHW |
| | | VRQAPGQGLEWMGIIDPSGGSTNYAQKFQGRVTMTRDTSTSTVYMELSSLRS |
| | | EDTAVYYCARDYYGSGSYYGLDYWGRGTLVTVSSGGGGSGGGGSGGGGSG |
| | | GGGSFWVLVVVGGVLACYSLLVTVAFIIFWVRSKRSRLLHSDYMNMTPRRP |
| | | GPTRKHYQPYAPPRDFAAYRSKRGRKKLLYIFKQPFMRPVQTTQEEDGCSCR |
| | | FPEEEEGGCELRVKFSRSADAPAYKQGQNQLYNELNLGRREEYDVLDKRRG |
| | | RDPEMGGKPRRKNPQEGLYNELQKDKMAEAYSEIGMKGERRRGKGHDGLY |
| | | QGLSTATKDTYDALHMQALPPR |
| 27 | 1565 | MALPVTALLLPLALLLHAARPDIQMTQSPSSLSASVGDRVTITCRASQGISNN |
| | | LNWYQQKPGKAPKLLIYDASNLETGVPSRFSGSGSGTDFTLTISSLQPEDFAT |
| | | YYCQQANSFPLTFGPGTKVDIKRTTTPAPRPPTPAPTIASQPLSLRPEACRPAA |
| | | GGAVHTRGLDFACDQVQLVQSGAEVKKPGASVKVSCKASGYTFTSYYMHW |
| | | VRQAPGQGLEWMGIIDPSGGSTNYAQKFQGRVTMTRDTSTSTVYMELSSLRS |
| | | EDTAVYYCARDYYGSGSYYGLDYWGRGTLVTVSSGGGGSGGGGSGGGGSG |
| | | GGGSFWVLVVVGGVLACYSLLVTVAFIIFWVRSKRSRLLHSDYMNMTPRRP |
| | | GPTRKHYQPYAPPRDFAAYRSRVKFSRSADAPAYKQGQNQLYNELNLGRRE |
| | | EYDVLDKRRGRDPEMGGKPRRKNPQEGLYNELQKDKMAEAYSEIGMKGER |
| | | RRGKGHDGLYQGLSTATKDTYDALHMQALPPR |
| 28 | 1566 | MALPVTALLLPLALLLHAARPDIQMTQSPSSLSASVGDRVTITCRASQGISNY |
| | | LAWYQQKPGKAPKLLIYTASTLQSGVPSRFSGSGSGTDFTLTISSLQPEDFAT |
| | | YYCQQSYSTPLTFGGGTKVEIKRTTTPAPRPPTPAPTIASQPLSLRPEACRPAA |
| | | GGAVHTRGLDFACDQVQLVQSGAEVKKPGASVKVSCKASGYSFTSHAISWV |
| | | RQAPGQGLEWMGWIKPNSGDTKYAQKFQGRVTMTRDTSTSTVYMELSSLR |
| | | SEDTAVYYCARGSDDYYGSYYFDYWGQGTLVTVSSGGGGSGGGGSGGGGS |
| | | GGGGSFWVLVVVGGVLACYSLLVTVAFIIFWVKRGRKKLLYIFKQPFMRPV |
| | | QTTQEEDGCSCRFPEEEEGGCELRVKFSRSADAPAYKQGQNQLYNELNLGRR |
| | | EEYDVLDKRRGRDPEMGGKPRRKNPQEGLYNELQKDKMAEAYSEIGMKGE |
| | | RRRGKGHDGLYQGLSTATKDTYDALHMQALPPR |
| 29 | 1567 | MALPVTALLLPLALLLHAARPDIQMTQSPSSLSASVGDRVTITCRASQGISNY |
| | | LAWYQQKPGKAPKLLIYTASTLQSGVPSRFSGSGSGTDFTLTISSLQPEDFAT |
| | | YYCQQSYSTPLTFGGGTKVEIKRTTTPAPRPPTPAPTIASQPLSLRPEACRPAA |
| | | GGAVHTRGLDFACDQVQLVQSGAEVKKPGASVKVSCKASGYSFTSHAISWV |
| | | RQAPGQGLEWMGWIKPNSGDTKYAQKFQGRVTMTRDTSTSTVYMELSSLR |
| | | SEDTAVYYCARGSDDYYGSYYFDYWGQGTLVTVSSGGGGSGGGGSGGGGS |
| | | GGGGSFWVLVVVGGVLACYSLLVTVAFIIFWVRSKRSRLLHSDYMNMTPRR |
| | | PGPTRKHYQPYAPPRDFAAYRSKRGRKKLLYIFKQPFMRPVQTTQEEDGCSC |
| | | RFPEEEEGGCELRVKFSRSADAPAYKQGQNQLYNELNLGRREEYDVLDKRR |
| | | GRDPEMGGKPRRKNPQEGLYNELQKDKMAEAYSEIGMKGERRRGKGHDGL |
| | | YQGLSTATKDTYDALHMQALPPR |
| 30 | 1568 | MALPVTALLLPLALLLHAARPDIQMTQSPSSLSASVGDRVTITCRASQGISNY |
| | | LAWYQQKPGKAPKLLIYTASTLQSGVPSRFSGSGSGTDFTLTISSLQPEDFAT |
| | | YYCQQSYSTPLTFGGGTKVEIKRTTTPAPRPPTPAPTIASQPLSLRPEACRPAA |
| | | GGAVHTRGLDFACDQVQLVQSGAEVKKPGASVKVSCKASGYSFTSHAISWV |
| | | RQAPGQGLEWMGWIKPNSGDTKYAQKFQGRVTMTRDTSTSTVYMELSSLR |
| | | SEDTAVYYCARGSDDYYGSYYFDYWGQGTLVTVSSGGGGSGGGGSGGGGS |
| | | GGGGSFWVLVVVGGVLACYSLLVTVAFIIFWVRSKRSRLLHSDYMNMTPRR |
| | | PGPTRKHYQPYAPPRDFAAYRSRVKFSRSADAPAYKQGQNQLYNELNLGRR |
| | | EEYDVLDKRRGRDPEMGGKPRRKNPQEGLYNELQKDKMAEAYSEIGMKGE |
| | | RRRGKGHDGLYQGLSTATKDTYDALHMQALPPR |
| 31 | 1569 | MALPVTALLLPLALLLHAARPQVQLVQSGAEVKKPGASVKVSCKASGYSFT |
| | | GYYIHWVRQAPGQGLEWMGWINPNSGGTNYAQKFQGRVTMTRDTSTSTVY |
| | | MELSSLRSEDTAVYYCARDQWDGYNSGYFDYWGQGTLVTVSSTTTPAPRPP |
| | | TPAPTIASQPLSLRPEACRPAAGGAVHTRGLDFACDDIQMTQSPSSLSASVGD |
| | | RVTITCRASQTINDWLAWYQQKPGKAPKLLIYSASTLHSGVPSRFSGSGSGTD |
| | | FTLTISSLQPEDFATYYCQQAYSTPWTFGQGTKVEIKRGGGGSGGGGSGGGG |
| | | SGGGGSFWVLVVVGGVLACYSLLVTVAFIIFWVRSKRSRLLHSDYMNMTPR |
| | | RPGPTRKHYQPYAPPRDFAAYRSRVKFSRSADAPAYKQGQNQLYNELNLGR |
| | | REEYDVLDKRRGRDPEMGGKPRRKNPQEGLYNELQKDKMAEAYSEIGMKG |
| | | ERRRGKGHDGLYQGLSTATKDTYDALHMQALPPR |
| 32 | 1570 | MALPVTALLLPLALLLHAARPQVQLVQSGAEVKKPGASVKVSCKASGYSFT |
| | | GYYIHWVRQAPGQGLEWMGWINPNSGGTNYAQKFQGRVTMTRDTSTSTVY |
| | | MELSSLRSEDTAVYYCARDQWDGYNSGYFDYWGQGTLVTVSSTTTPAPRPP |
| | | TPAPTIASQPLSLRPEACRPAAGGAVHTRGLDFACDDIQMTQSPSSLSASVGD |
| | | RVTITCRASQTINDWLAWYQQKPGKAPKLLIYSASTLHSGVPSRFSGSGSGTD |
| | | FTLTISSLQPEDFATYYCQQAYSTPWTFGQGTKVEIKRGGGGSGGGGSGGGG |
| | | SGGGGSFWVLVVVGGVLACYSLLVTVAFIIFWVKRGRKKLLYIFKQPFMRPV |
| | | QTTQEEDGCSCRFPEEEEGGCELRVKFSRSADAPAYKQGQNQLYNELNLGRR |
| | | EEYDVLDKRRGRDPEMGGKPRRKNPQEGLYNELQKDKMAEAYSEIGMKGE |
| | | RRRGKGHDGLYQGLSTATKDTYDALHMQALPPR |
| 33 | 1571 | MALPVTALLLPLALLLHAARPQVQLVQSGAEVKKPGASVKVSCKASGYSFT |
| | | GYYIHWVRQAPGQGLEWMGWINPNSGGTNYAQKFQGRVTMTRDTSTSTVY |
| | | MELSSLRSEDTAVYYCARDQWDGYNSGYFDYWGQGTLVTVSSTTTPAPRPP |
| | | TPAPTIASQPLSLRPEACRPAAGGAVHTRGLDFACDDIQMTQSPSSLSASVGD |
| | | RVTITCRASQTINDWLAWYQQKPGKAPKLLIYSASTLHSGVPSRFSGSGSGTD |
| | | FTLTISSLQPEDFATYYCQQAYSTPWTFGQGTKVEIKRGGGGSGGGGSGGGG |
| | | SGGGGSFWVLVVVGGVLACYSLLVTVAFIIFWVRSKRSRLLHSDYMNMTPR |
| | | RPGPTRKHYQPYAPPRDFAAYRSKRGRKKLLYIFKQPFMRPVQTTQEEDGCS |
| | | CRFPEEEEGGCELRVKFSRSADAPAYKQGQNQLYNELNLGRREEYDVLDKR |
| | | RGRDPEMGGKPRRKNPQEGLYNELQKDKMAEAYSEIGMKGERRRGKGHDG |
| | | LYQGLSTATKDTYDALHMQALPPR |
| 34 | 1572 | MALPVTALLLPLALLLHAARPQVQLVQSGAEVKKPGASVKVSCKASGNTFT |
| | | SYGISWVRQAPGQGLEWMGWINPNSGGTKYAQKFQGRVTMTRDTSTSTVY |
| | | MELSSLRSEDTAVYYCARESWFGELYYGMDVWGKGTTVTVSSTTTPAPRPP |
| | | TPAPTIASQPLSLRPEACRPAAGGAVHTRGLDFACDDIVMTQSPLSLPVTPGE |
| | | PASISCRSSQSLLHSNGYNYLDWYLQKPGQSPQLLIYLGSDRASGVPDRESGS |
| | | GSGTDFTLKISRVEAEDVGVYYCMQGLQTPITFGQGTRLEIKRGGGGSGGGG |
| | | SGGGGSGGGGSFWVLVVVGGVLACYSLLVTVAFIIFWVRSKRSRLLHSDYM |
| | | NMTPRRPGPTRKHYQPYAPPRDFAAYRSRVKFSRSADAPAYKQGQNQLYNE |
| | | LNLGRREEYDVLDKRRGRDPEMGGKPRRKNPQEGLYNELQKDKMAEAYSEI |
| | | GMKGERRRGKGHDGLYQGLSTATKDTYDALHMQALPPR |
| 35 | 1573 | MALPVTALLLPLALLLHAARPQVQLVQSGAEVKKPGASVKVSCKASGNTFT |
| | | SYGISWVRQAPGQGLEWMGWINPNSGGTKYAQKFQGRVTMTRDTSTSTVY |
| | | MELSSLRSEDTAVYYCARESWFGELYYGMDVWGKGTTVTVSSTTTPAPRPP |
| | | TPAPTIASQPLSLRPEACRPAAGGAVHTRGLDFACDDIVMTQSPLSLPVTPGE |
| | | PASISCRSSQSLLHSNGYNYLDWYLQKPGQSPQLLIYLGSDRASGVPDRESGS |
| | | GSGTDFTLKISRVEAEDVGVYYCMQGLQTPITFGQGTRLEIKRGGGGSGGGG |
| | | SGGGGSGGGGSFWVLVVVGGVLACYSLLVTVAFIIFWVKRGRKKLLYIFKQP |
| | | FMRPVQTTQEEDGCSCRFPEEEEGGCELRVKFSRSADAPAYKQGQNQLYNEL |
| | | NLGRREEYDVLDKRRGRDPEMGGKPRRKNPQEGLYNELQKDKMAEAYSEI |
| | | GMKGERRRGKGHDGLYQGLSTATKDTYDALHMQALPPR |
| 36 | 1574 | MALPVTALLLPLALLLHAARPQVQLVQSGAEVKKPGASVKVSCKASGNTFT |
| | | SYGISWVRQAPGQGLEWMGWINPNSGGTKYAQKFQGRVTMTRDTSTSTVY |
| | | MELSSLRSEDTAVYYCARESWFGELYYGMDVWGKGTTVTVSSTTTPAPRPP |
| | | TPAPTIASQPLSLRPEACRPAAGGAVHTRGLDFACDDIVMTQSPLSLPVTPGE |
| | | PASISCRSSQSLLHSNGYNYLDWYLQKPGQSPQLLIYLGSDRASGVPDRESGS |
| | | GSGTDFTLKISRVEAEDVGVYYCMQGLQTPITFGQGTRLEIKRGGGGSGGGG |
| | | SGGGGSGGGGSFWVLVVVGGVLACYSLLVTVAFIIFWVRSKRSRLLHSDYM |
| | | NMTPRRPGPTRKHYQPYAPPRDFAAYRSKRGRKKLLYIFKQPFMRPVQTTQE |
| | | EDGCSCRFPEEEEGGCELRVKFSRSADAPAYKQGQNQLYNELNLGRREEYD |
| | | VLDKRRGRDPEMGGKPRRKNPQEGLYNELQKDKMAEAYSEIGMKGERRRG |
| | | KGHDGLYQGLSTATKDTYDALHMQALPPR |
| 37 | 1575 | MALPVTALLLPLALLLHAARPQVQLVQSGAEVKKPGASVKVSCKASGYTFT |
| | | AYYTHWVRQAPGQGLEWMGWMNPNSGHTSYAQKFQGRVTMTRDTSTSTV |
| | | YMELSSLRSEDTAVYYCAREAYDSFDYWGQGTLVTVSSTTTPAPRPPTPAPTI |
| | | ASQPLSLRPEACRPAAGGAVHTRGLDFACDDIQMTQSPSSLSASVGDRVTITC |
| | | RASQSISSYLNWYQQKPGKAPKLLIYEASTLETGVPSRFSGSGSGTDFTLTISS |
| | | LQPEDFATYYCQQANSFPFTFGPGTKVDIKRGGGGSGGGGSGGGGSGGGGSF |
| | | WVLVVVGGVLACYSLLVTVAFIIFWVRSKRSRLLHSDYMNMTPRRPGPTRK |
| | | HYQPYAPPRDFAAYRSRVKFSRSADAPAYKQGQNQLYNELNLGRREEYDVL |
| | | DKRRGRDPEMGGKPRRKNPQEGLYNELQKDKMAEAYSEIGMKGERRRGKG |
| | | HDGLYQGLSTATKDTYDALHMQALPPR |
| 38 | 1576 | MALPVTALLLPLALLLHAARPQVQLVQSGAEVKKPGASVKVSCKASGYTFT |
| | | AYYTHWVRQAPGQGLEWMGWMNPNSGHTSYAQKFQGRVTMTRDTSTSTV |
| | | YMELSSLRSEDTAVYYCAREAYDSFDYWGQGTLVTVSSTTTPAPRPPTPAPTI |
| | | ASQPLSLRPEACRPAAGGAVHTRGLDFACDDIQMTQSPSSLSASVGDRVTITC |
| | | RASQSISSYLNWYQQKPGKAPKLLIYEASTLETGVPSRFSGSGSGTDFTLTISS |
| | | LQPEDFATYYCQQANSFPFTFGPGTKVDIKRGGGGSGGGGSGGGGSGGGGSF |
| | | WVLVVVGGVLACYSLLVTVAFIIFWVKRGRKKLLYIFKQPFMRPVQTTQEED |
| | | GCSCRFPEEEEGGCELRVKFSRSADAPAYKQGQNQLYNELNLGRREEYDVL |
| | | DKRRGRDPEMGGKPRRKNPQEGLYNELQKDKMAEAYSEIGMKGERRRGKG |
| | | HDGLYQGLSTATKDTYDALHMQALPPR |
| 39 | 1577 | MALPVTALLLPLALLLHAARPQVQLVQSGAEVKKPGASVKVSCKASGYTFT |
| | | AYYTHWVRQAPGQGLEWMGWMNPNSGHTSYAQKFQGRVTMTRDTSTSTV |
| | | YMELSSLRSEDTAVYYCAREAYDSFDYWGQGTLVTVSSTTTPAPRPPTPAPTI |
| | | ASQPLSLRPEACRPAAGGAVHTRGLDFACDDIQMTQSPSSLSASVGDRVTITC |
| | | RASQSISSYLNWYQQKPGKAPKLLIYEASTLETGVPSRFSGSGSGTDFTLTISS |
| | | LQPEDFATYYCQQANSFPFTFGPGTKVDIKRGGGGSGGGGSGGGGSGGGGSF |
| | | WVLVVVGGVLACYSLLVTVAFIIFWVRSKRSRLLHSDYMNMTPRRPGPTRK |
| | | HYQPYAPPRDFAAYRSKRGRKKLLYIFKQPFMRPVQTTQEEDGCSCRFPEEE |
| | | EGGCELRVKFSRSADAPAYKQGQNQLYNELNLGRREEYDVLDKRRGRDPE |
| | | MGGKPRRKNPQEGLYNELQKDKMAEAYSEIGMKGERRRGKGHDGLYQGLS |
| | | TATKDTYDALHMQALPPR |
| 40 | 1578 | MALPVTALLLPLALLLHAARPQVQLVQSGAEVKKPGASVKVSCKASGYTFT |
| | | DYYMHWVRQAPGQGLEWMGWINPNSGGTNYAQKFQGRVTMTRDTSTSTV |
| | | YMELSSLRSEDTAVYYCARDSRIAVAASSFDYWGQGTLVTVSSTTTPAPRPP |
| | | TPAPTIASQPLSLRPEACRPAAGGAVHTRGLDFACDDIQMTQSPSSLSASVGD |
| | | RVTITCRASRGINNWLTWYQQKPGKAPKLLIYGASSLQSGVPSRFSGSGSGTD |
| | | FTLTISSLQPEDFATYYCQQSYRIPYTFGQGTKLEIKRGGGGSGGGGSGGGGS |
| | | GGGGSFWVLVVVGGVLACYSLLVTVAFIIFWVRSKRSRLLHSDYMNMTPRR |
| | | PGPTRKHYQPYAPPRDFAAYRSRVKFSRSADAPAYKQGQNQLYNELNLGRR |
| | | EEYDVLDKRRGRDPEMGGKPRRKNPQEGLYNELQKDKMAEAYSEIGMKGE |
| | | RRRGKGHDGLYQGLSTATKDTYDALHMQALPPR |
| 41 | 1579 | MALPVTALLLPLALLLHAARPQVQLVQSGAEVKKPGASVKVSCKASGYTFT |
| | | DYYMHWVRQAPGQGLEWMGWINPNSGGTNYAQKFQGRVTMTRDTSTSTV |
| | | YMELSSLRSEDTAVYYCARDSRIAVAASSFDYWGQGTLVTVSSTTTPAPRPP |
| | | TPAPTIASQPLSLRPEACRPAAGGAVHTRGLDFACDDIQMTQSPSSLSASVGD |
| | | RVTITCRASRGINNWLTWYQQKPGKAPKLLIYGASSLQSGVPSRFSGSGSGTD |
| | | FTLTISSLQPEDFATYYCQQSYRIPYTFGQGTKLEIKRGGGGSGGGGSGGGGS |
| | | GGGGSFWVLVVVGGVLACYSLLVTVAFIIFWVKRGRKKLLYIFKQPFMRPV |
| | | QTTQEEDGCSCRFPEEEEGGCELRVKFSRSADAPAYKQGQNQLYNELNLGRR |
| | | EEYDVLDKRRGRDPEMGGKPRRKNPQEGLYNELQKDKMAEAYSEIGMKGE |
| | | RRRGKGHDGLYQGLSTATKDTYDALHMQALPPR |
| 42 | 1580 | MALPVTALLLPLALLLHAARPQVQLVQSGAEVKKPGASVKVSCKASGYTFT |
| | | DYYMHWVRQAPGQGLEWMGWINPNSGGTNYAQKFQGRVTMTRDTSTSTV |
| | | YMELSSLRSEDTAVYYCARDSRIAVAASSFDYWGQGTLVTVSSTTTPAPRPP |
| | | TPAPTIASQPLSLRPEACRPAAGGAVHTRGLDFACDDIQMTQSPSSLSASVGD |
| | | RVTITCRASRGINNWLTWYQQKPGKAPKLLIYGASSLQSGVPSRFSGSGSGTD |
| | | FTLTISSLQPEDFATYYCQQSYRIPYTFGQGTKLEIKRGGGGSGGGGSGGGGS |
| | | GGGGSFWVLVVVGGVLACYSLLVTVAFIIFWVRSKRSRLLHSDYMNMTPRR |
| | | PGPTRKHYQPYAPPRDFAAYRSKRGRKKLLYIFKQPFMRPVQTTQEEDGCSC |
| | | RFPEEEEGGCELRVKFSRSADAPAYKQGQNQLYNELNLGRREEYDVLDKRR |
| | | GRDPEMGGKPRRKNPQEGLYNELQKDKMAEAYSEIGMKGERRRGKGHDGL |
| | | YQGLSTATKDTYDALHMQALPPR |
| 43 | 1581 | MALPVTALLLPLALLLHAARPQVQLVQSGAEVKKPGASVKVSCKASGYTFT |
| | | GYYMHWVRQAPGQGLEWMGRINPNGGSTTYAQKFQGRVTMTRDTSTSTV |
| | | YMELSSLRSEDTAVYYCARDDFYYYYLDFWGKGTTVTVSSTTTPAPRPPTPA |
| | | PTIASQPLSLRPEACRPAAGGAVHTRGLDFACDDIQMTQSPSSLSASVGDRVT |
| | | ITCRASQSINDWLAWYQQKPGKAPKLLIYAASNLQSGVPSRFSGSGSGTDFTL |
| | | TISSLQPEDFATYYCQQGYSTPPTFGQGTKVEIKRGGGGSGGGGSGGGGSGG |
| | | GGSFWVLVVVGGVLACYSLLVTVAFIIFWVRSKRSRLLHSDYMNMTPRRPG |
| | | PTRKHYQPYAPPRDFAAYRSRVKFSRSADAPAYKQGQNQLYNELNLGRREE |
| | | YDVLDKRRGRDPEMGGKPRRKNPQEGLYNELQKDKMAEAYSEIGMKGERR |
| | | RGKGHDGLYQGLSTATKDTYDALHMQALPPR |
| 44 | 1582 | MALPVTALLLPLALLLHAARPQVQLVQSGAEVKKPGASVKVSCKASGYTFT |
| | | GYYMHWVRQAPGQGLEWMGRINPNGGSTTYAQKFQGRVTMTRDTSTSTV |
| | | YMELSSLRSEDTAVYYCARDDFYYYYLDFWGKGTTVTVSSTTTPAPRPPTPA |
| | | PTIASQPLSLRPEACRPAAGGAVHTRGLDFACDDIQMTQSPSSLSASVGDRVT |
| | | ITCRASQSINDWLAWYQQKPGKAPKLLIYAASNLQSGVPSRFSGSGSGTDFTL |
| | | TISSLQPEDFATYYCQQGYSTPPTFGQGTKVEIKRGGGGSGGGGSGGGGSGG |
| | | GGSFWVLVVVGGVLACYSLLVTVAFIIFWVKRGRKKLLYIFKQPFMRPVQTT |
| | | QEEDGCSCRFPEEEEGGCELRVKFSRSADAPAYKQGQNQLYNELNLGRREEY |
| | | DVLDKRRGRDPEMGGKPRRKNPQEGLYNELQKDKMAEAYSEIGMKGERRR |
| | | GKGHDGLYQGLSTATKDTYDALHMQALPPR |
| 45 | 1583 | MALPVTALLLPLALLLHAARPQVQLVQSGAEVKKPGASVKVSCKASGYTFT |
| | | GYYMHWVRQAPGQGLEWMGRINPNGGSTTYAQKFQGRVTMTRDTSTSTV |
| | | YMELSSLRSEDTAVYYCARDDFYYYYLDFWGKGTTVTVSSTTTPAPRPPTPA |
| | | PTIASQPLSLRPEACRPAAGGAVHTRGLDFACDDIQMTQSPSSLSASVGDRVT |
| | | ITCRASQSINDWLAWYQQKPGKAPKLLIYAASNLQSGVPSRFSGSGSGTDFTL |
| | | TISSLQPEDFATYYCQQGYSTPPTFGQGTKVEIKRGGGGSGGGGSGGGGSGG |
| | | GGSFWVLVVVGGVLACYSLLVTVAFIIFWVRSKRSRLLHSDYMNMTPRRPG |
| | | PTRKHYQPYAPPRDFAAYRSKRGRKKLLYIFKQPFMRPVQTTQEEDGCSCRF |
| | | PEEEEGGCELRVKFSRSADAPAYKQGQNQLYNELNLGRREEYDVLDKRRGR |
| | | DPEMGGKPRRKNPQEGLYNELQKDKMAEAYSEIGMKGERRRGKGHDGLYQ |
| | | GLSTATKDTYDALHMQALPPR |
| 46 | 1584 | MALPVTALLLPLALLLHAARPQVQLVQSGAEVKKPGASVKVSCKASGYTFS |
| | | NYYMHWVRQAPGQGLEWMGWMNPDSGTTGYAQKFQGRVTMTRDTSTST |
| | | VYMELSSLRSEDTAVYYCVRDGTMVQGIFDYWGQGTLVTVSSTTTPAPRPPT |
| | | PAPTIASQPLSLRPEACRPAAGGAVHTRGLDFACDDIQMTQSPSSLSASVGDR |
| | | VTITCRASQSISSWLAWYQQKPGKAPKLLIYGASSLQSGVPSRFSGSGSGTDF |
| | | TLTISSLQPEDFATYYCQQTYRTPLTFGPGTKVDIKRGGGGSGGGGSGGGGS |
| | | GGGGSFWVLVVVGGVLACYSLLVTVAFIIFWVRSKRSRLLHSDYMNMTPRR |
| | | PGPTRKHYQPYAPPRDFAAYRSRVKFSRSADAPAYKQGQNQLYNELNLGRR |
| | | EEYDVLDKRRGRDPEMGGKPRRKNPQEGLYNELQKDKMAEAYSEIGMKGE |
| | | RRRGKGHDGLYQGLSTATKDTYDALHMQALPPR |
| 47 | 1585 | MALPVTALLLPLALLLHAARPQVQLVQSGAEVKKPGASVKVSCKASGYTFS |
| | | NYYMHWVRQAPGQGLEWMGWMNPDSGTTGYAQKFQGRVTMTRDTSTST |
| | | VYMELSSLRSEDTAVYYCVRDGTMVQGIFDYWGQGTLVTVSSTTTPAPRPPT |
| | | PAPTIASQPLSLRPEACRPAAGGAVHTRGLDFACDDIQMTQSPSSLSASVGDR |
| | | VTITCRASQSISSWLAWYQQKPGKAPKLLIYGASSLQSGVPSRFSGSGSGTDF |
| | | TLTISSLQPEDFATYYCQQTYRTPLTFGPGTKVDIKRGGGGSGGGGSGGGGS |
| | | GGGGSFWVLVVVGGVLACYSLLVTVAFIIFWVKRGRKKLLYIFKQPFMRPV |
| | | QTTQEEDGCSCRFPEEEEGGCELRVKFSRSADAPAYKQGQNQLYNELNLGRR |
| | | EEYDVLDKRRGRDPEMGGKPRRKNPQEGLYNELQKDKMAEAYSEIGMKGE |
| | | RRRGKGHDGLYQGLSTATKDTYDALHMQALPPR |
| 48 | 1586 | MALPVTALLLPLALLLHAARPQVQLVQSGAEVKKPGASVKVSCKASGYTFS |
| | | NYYMHWVRQAPGQGLEWMGWMNPDSGTTGYAQKFQGRVTMTRDTSTST |
| | | VYMELSSLRSEDTAVYYCVRDGTMVQGIFDYWGQGTLVTVSSTTTPAPRPPT |
| | | PAPTIASQPLSLRPEACRPAAGGAVHTRGLDFACDDIQMTQSPSSLSASVGDR |
| | | VTITCRASQSISSWLAWYQQKPGKAPKLLIYGASSLQSGVPSRFSGSGSGTDF |
| | | TLTISSLQPEDFATYYCQQTYRTPLTFGPGTKVDIKRGGGGSGGGGSGGGGS |
| | | GGGGSFWVLVVVGGVLACYSLLVTVAFIIFWVRSKRSRLLHSDYMNMTPRR |
| | | PGPTRKHYQPYAPPRDFAAYRSKRGRKKLLYIFKQPFMRPVQTTQEEDGCSC |
| | | RFPEEEEGGCELRVKFSRSADAPAYKQGQNQLYNELNLGRREEYDVLDKRR |
| | | GRDPEMGGKPRRKNPQEGLYNELQKDKMAEAYSEIGMKGERRRGKGHDGL |
| | | YQGLSTATKDTYDALHMQALPPR |
| 49 | 1587 | MALPVTALLLPLALLLHAARPQVQLVQSGAEVKKPGSSVKVSCKASGGTFST |
| | | YAITWVRQAPGQGLEWMGGIIPIVGRANYAQKFQGRVTITADESTSTAYMEL |
| | | SSLRSEDTAVYYCARSGGHDLDYWGQGTLVTVSSTTTPAPRPPTPAPTIASQP |
| | | LSLRPEACRPAAGGAVHTRGLDFACDDIQMTQSPSSLSASVGDRVTITCRASQ |
| | | GIGNDLGWYQQKPGKAPKLLIYGASSVQSGVPSRFSGSGSGTDFTLTISSLQP |
| | | EDFATYYCQQSYSTPITFGQGTRLEIKRGGGGSGGGGSGGGGSGGGGSFWVL |
| | | VVVGGVLACYSLLVTVAFIIFWVKRGRKKLLYIFKQPFMRPVQTTQEEDGCS |
| | | CRFPEEEEGGCELRVKFSRSADAPAYKQGQNQLYNELNLGRREEYDVLDKR |
| | | RGRDPEMGGKPRRKNPQEGLYNELQKDKMAEAYSEIGMKGERRRGKGHDG |
| | | LYQGLSTATKDTYDALHMQALPPR |
| 50 | 1588 | MALPVTALLLPLALLLHAARPQVQLVQSGAEVKKPGSSVKVSCKASGGTFST |
| | | YAITWVRQAPGQGLEWMGGIIPIVGRANYAQKFQGRVTITADESTSTAYMEL |
| | | SSLRSEDTAVYYCARSGGHDLDYWGQGTLVTVSSTTTPAPRPPTPAPTIASQP |
| | | LSLRPEACRPAAGGAVHTRGLDFACDDIQMTQSPSSLSASVGDRVTITCRASQ |
| | | GIGNDLGWYQQKPGKAPKLLIYGASSVQSGVPSRFSGSGSGTDFTLTISSLQP |
| | | EDFATYYCQQSYSTPITFGQGTRLEIKRGGGGSGGGGSGGGGSGGGGSFWVL |
| | | VVVGGVLACYSLLVTVAFIIFWVRSKRSRLLHSDYMNMTPRRPGPTRKHYQP |
| | | YAPPRDFAAYRSKRGRKKLLYIFKQPFMRPVQTTQEEDGCSCRFPEEEEGGC |
| | | ELRVKFSRSADAPAYKQGQNQLYNELNLGRREEYDVLDKRRGRDPEMGGK |
| | | PRRKNPQEGLYNELQKDKMAEAYSEIGMKGERRRGKGHDGLYQGLSTATK |
| | | DTYDALHMQALPPR |
| 51 | 1589 | MALPVTALLLPLALLLHAARPQVQLVQSGAEVKKPGSSVKVSCKASGGTFST |
| | | YAITWVRQAPGQGLEWMGGIIPIVGRANYAQKFQGRVTITADESTSTAYMEL |
| | | SSLRSEDTAVYYCARSGGHDLDYWGQGTLVTVSSTTTPAPRPPTPAPTIASQP |
| | | LSLRPEACRPAAGGAVHTRGLDFACDDIQMTQSPSSLSASVGDRVTITCRASQ |
| | | GIGNDLGWYQQKPGKAPKLLIYGASSVQSGVPSRFSGSGSGTDFTLTISSLQP |
| | | EDFATYYCQQSYSTPITFGQGTRLEIKRGGGGSGGGGSGGGGSGGGGSFWVL |
| | | VVVGGVLACYSLLVTVAFIIFWVRSKRSRLLHSDYMNMTPRRPGPTRKHYQP |
| | | YAPPRDFAAYRSRVKFSRSADAPAYKQGQNQLYNELNLGRREEYDVLDKRR |
| | | GRDPEMGGKPRRKNPQEGLYNELQKDKMAEAYSEIGMKGERRRGKGHDGL |
| | | YQGLSTATKDTYDALHMQALPPR |
| 52 | 1590 | MALPVTALLLPLALLLHAARPEVQLLESGGGLVQPGGSLRLSCAASGFTFSSY |
| | | GMHWVRQAPGKGLEWVSSISGSGDTTYYADSVKGRFTISRDNSKNTLYLQM |
| | | NSLRAEDTAVYYCARDNPYGDYGGSFDYWGQGTLVTVSSTTTPAPRPPTPA |
| | | PTIASQPLSLRPEACRPAAGGAVHTRGLDFACDEIVMTQSPATLSVSPGERAT |
| | | LSCRASQSVSSSYLAWYQQKPGQAPRLLIYATSTRATGIPARFSGSGSGTEFT |
| | | LTISSLQSEDFAVYYCQQYGSLPLTFGQGTKVEIKRGGGGSGGGGSGGGGSG |
| | | GGGSFWVLVVVGGVLACYSLLVTVAFIIFWVKRGRKKLLYIFKQPFMRPVQT |
| | | TQEEDGCSCRFPEEEEGGCELRVKFSRSADAPAYKQGQNQLYNELNLGRREE |
| | | YDVLDKRRGRDPEMGGKPRRKNPQEGLYNELQKDKMAEAYSEIGMKGERR |
| | | RGKGHDGLYQGLSTATKDTYDALHMQALPPR |
| 53 | 1591 | MALPVTALLLPLALLLHAARPEVQLLESGGGLVQPGGSLRLSCAASGFTFSSY |
| | | GMHWVRQAPGKGLEWVSSISGSGDTTYYADSVKGRFTISRDNSKNTLYLQM |
| | | NSLRAEDTAVYYCARDNPYGDYGGSFDYWGQGTLVTVSSTTTPAPRPPTPA |
| | | PTIASQPLSLRPEACRPAAGGAVHTRGLDFACDEIVMTQSPATLSVSPGERAT |
| | | LSCRASQSVSSSYLAWYQQKPGQAPRLLIYATSTRATGIPARFSGSGSGTEFT |
| | | LTISSLQSEDFAVYYCQQYGSLPLTFGQGTKVEIKRGGGGSGGGGSGGGGSG |
| | | GGGSFWVLVVVGGVLACYSLLVTVAFIIFWVRSKRSRLLHSDYMNMTPRRP |
| | | GPTRKHYQPYAPPRDFAAYRSKRGRKKLLYIFKQPFMRPVQTTQEEDGCSCR |
| | | FPEEEEGGCELRVKFSRSADAPAYKQGQNQLYNELNLGRREEYDVLDKRRG |
| | | RDPEMGGKPRRKNPQEGLYNELQKDKMAEAYSEIGMKGERRRGKGHDGLY |
| | | QGLSTATKDTYDALHMQALPPR |
| 54 | 1592 | MALPVTALLLPLALLLHAARPEVQLLESGGGLVQPGGSLRLSCAASGFTFSSY |
| | | GMHWVRQAPGKGLEWVSSISGSGDTTYYADSVKGRFTISRDNSKNTLYLQM |
| | | NSLRAEDTAVYYCARDNPYGDYGGSFDYWGQGTLVTVSSTTTPAPRPPTPA |
| | | PTIASQPLSLRPEACRPAAGGAVHTRGLDFACDEIVMTQSPATLSVSPGERAT |
| | | LSCRASQSVSSSYLAWYQQKPGQAPRLLIYATSTRATGIPARFSGSGSGTEFT |
| | | LTISSLQSEDFAVYYCQQYGSLPLTFGQGTKVEIKRGGGGSGGGGSGGGGSG |
| | | GGGSFWVLVVVGGVLACYSLLVTVAFIIFWVRSKRSRLLHSDYMNMTPRRP |
| | | GPTRKHYQPYAPPRDFAAYRSRVKFSRSADAPAYKQGQNQLYNELNLGRRE |
| | | EYDVLDKRRGRDPEMGGKPRRKNPQEGLYNELQKDKMAEAYSEIGMKGER |
| | | RRGKGHDGLYQGLSTATKDTYDALHMQALPPR |
| 55 | 1593 | MALPVTALLLPLALLLHAARPQVQLVQSGAEVKKPGASVKVSCKASGYTFT |
| | | SYYMHWVRQAPGQGLEWMGIIDPSGGSTNYAQKFQGRVTMTRDTSTSTVY |
| | | MELSSLRSEDTAVYYCARDYYGSGSYYGLDYWGRGTLVTVSSTTTPAPRPPT |
| | | PAPTIASQPLSLRPEACRPAAGGAVHTRGLDFACDDIQMTQSPSSLSASVGDR |
| | | VTITCRASQGISNNLNWYQQKPGKAPKLLIYDASNLETGVPSRFSGSGSGTDF |
| | | TLTISSLQPEDFATYYCQQANSFPLTFGPGTKVDIKRGGGGSGGGGSGGGGSG |
| | | GGGSFWVLVVVGGVLACYSLLVTVAFIIFWVKRGRKKLLYIFKQPFMRPVQT |
| | | TQEEDGCSCRFPEEEEGGCELRVKFSRSADAPAYKQGQNQLYNELNLGRREE |
| | | YDVLDKRRGRDPEMGGKPRRKNPQEGLYNELQKDKMAEAYSEIGMKGERR |
| | | RGKGHDGLYQGLSTATKDTYDALHMQALPPR |
| 56 | 1594 | MALPVTALLLPLALLLHAARPQVQLVQSGAEVKKPGASVKVSCKASGYTFT |
| | | SYYMHWVRQAPGQGLEWMGIIDPSGGSTNYAQKFQGRVTMTRDTSTSTVY |
| | | MELSSLRSEDTAVYYCARDYYGSGSYYGLDYWGRGTLVTVSSTTTPAPRPPT |
| | | PAPTIASQPLSLRPEACRPAAGGAVHTRGLDFACDDIQMTQSPSSLSASVGDR |
| | | VTITCRASQGISNNLNWYQQKPGKAPKLLIYDASNLETGVPSRFSGSGSGTDF |
| | | TLTISSLQPEDFATYYCQQANSFPLTFGPGTKVDIKRGGGGSGGGGSGGGGSG |
| | | GGGSFWVLVVVGGVLACYSLLVTVAFIIFWVRSKRSRLLHSDYMNMTPRRP |
| | | GPTRKHYQPYAPPRDFAAYRSKRGRKKLLYIFKQPFMRPVQTTQEEDGCSCR |
| | | FPEEEEGGCELRVKFSRSADAPAYKQGQNQLYNELNLGRREEYDVLDKRRG |
| | | RDPEMGGKPRRKNPQEGLYNELQKDKMAEAYSEIGMKGERRRGKGHDGLY |
| | | QGLSTATKDTYDALHMQALPPR |
| 57 | 1595 | MALPVTALLLPLALLLHAARPQVQLVQSGAEVKKPGASVKVSCKASGYTFT |
| | | SYYMHWVRQAPGQGLEWMGIIDPSGGSTNYAQKFQGRVTMTRDTSTSTVY |
| | | MELSSLRSEDTAVYYCARDYYGSGSYYGLDYWGRGTLVTVSSTTTPAPRPPT |
| | | PAPTIASQPLSLRPEACRPAAGGAVHTRGLDFACDDIQMTQSPSSLSASVGDR |
| | | VTITCRASQGISNNLNWYQQKPGKAPKLLIYDASNLETGVPSRFSGSGSGTDF |
| | | TLTISSLQPEDFATYYCQQANSFPLTFGPGTKVDIKRGGGGSGGGGSGGGGSG |
| | | GGGSFWVLVVVGGVLACYSLLVTVAFIIFWVRSKRSRLLHSDYMNMTPRRP |
| | | GPTRKHYQPYAPPRDFAAYRSRVKFSRSADAPAYKQGQNQLYNELNLGRRE |
| | | EYDVLDKRRGRDPEMGGKPRRKNPQEGLYNELQKDKMAEAYSEIGMKGER |
| | | RRGKGHDGLYQGLSTATKDTYDALHMQALPPR |
| 58 | 1596 | MALPVTALLLPLALLLHAARPQVQLVQSGAEVKKPGASVKVSCKASGYSFT |
| | | SHAISWVRQAPGQGLEWMGWIKPNSGDTKYAQKFQGRVTMTRDTSTSTVY |
| | | MELSSLRSEDTAVYYCARGSDDYYGSYYFDYWGQGTLVTVSSTTTPAPRPPT |
| | | PAPTIASQPLSLRPEACRPAAGGAVHTRGLDFACDDIQMTQSPSSLSASVGDR |
| | | VTITCRASQGISNYLAWYQQKPGKAPKLLIYTASTLQSGVPSRFSGSGSGTDF |
| | | TLTISSLQPEDFATYYCQQSYSTPLTFGGGTKVEIKRGGGGSGGGGSGGGGSG |
| | | GGGSFWVLVVVGGVLACYSLLVTVAFIIFWVKRGRKKLLYIFKQPFMRPVQT |
| | | TQEEDGCSCRFPEEEEGGCELRVKFSRSADAPAYKQGQNQLYNELNLGRREE |
| | | YDVLDKRRGRDPEMGGKPRRKNPQEGLYNELQKDKMAEAYSEIGMKGERR |
| | | RGKGHDGLYQGLSTATKDTYDALHMQALPPR |
| 59 | 1597 | MALPVTALLLPLALLLHAARPQVQLVQSGAEVKKPGASVKVSCKASGYSFT |
| | | SHAISWVRQAPGQGLEWMGWIKPNSGDTKYAQKFQGRVTMTRDTSTSTVY |
| | | MELSSLRSEDTAVYYCARGSDDYYGSYYFDYWGQGTLVTVSSTTTPAPRPPT |
| | | PAPTIASQPLSLRPEACRPAAGGAVHTRGLDFACDDIQMTQSPSSLSASVGDR |
| | | VTITCRASQGISNYLAWYQQKPGKAPKLLIYTASTLQSGVPSRFSGSGSGTDF |
| | | TLTISSLQPEDFATYYCQQSYSTPLTFGGGTKVEIKRGGGGSGGGGSGGGGSG |
| | | GGGSFWVLVVVGGVLACYSLLVTVAFIIFWVRSKRSRLLHSDYMNMTPRRP |
| | | GPTRKHYQPYAPPRDFAAYRSKRGRKKLLYIFKQPFMRPVQTTQEEDGCSCR |
| | | FPEEEEGGCELRVKFSRSADAPAYKQGQNQLYNELNLGRREEYDVLDKRRG |
| | | RDPEMGGKPRRKNPQEGLYNELQKDKMAEAYSEIGMKGERRRGKGHDGLY |
| | | QGLSTATKDTYDALHMQALPPR |
| 60 | 1598 | MALPVTALLLPLALLLHAARPQVQLVQSGAEVKKPGASVKVSCKASGYSFT |
| | | SHAISWVRQAPGQGLEWMGWIKPNSGDTKYAQKFQGRVTMTRDTSTSTVY |
| | | MELSSLRSEDTAVYYCARGSDDYYGSYYFDYWGQGTLVTVSSTTTPAPRPPT |
| | | PAPTIASQPLSLRPEACRPAAGGAVHTRGLDFACDDIQMTQSPSSLSASVGDR |
| | | VTITCRASQGISNYLAWYQQKPGKAPKLLIYTASTLQSGVPSRFSGSGSGTDF |
| | | TLTISSLQPEDFATYYCQQSYSTPLTFGGGTKVEIKRGGGGSGGGGSGGGGSG |
| | | GGGSFWVLVVVGGVLACYSLLVTVAFIIFWVRSKRSRLLHSDYMNMTPRRP |
| | | GPTRKHYQPYAPPRDFAAYRSRVKFSRSADAPAYKQGQNQLYNELNLGRRE |
| | | EYDVLDKRRGRDPEMGGKPRRKNPQEGLYNELQKDKMAEAYSEIGMKGER |
| | | RRGKGHDGLYQGLSTATKDTYDALHMQALPPR |

[1275] Similar CARs comprising scFvs with variations are possible as well.

[1276] For example, the CD34 tag may be included in the expression vector along with a P2A sequence (so that it is co-expressed as a discrete protein), or the (GGGGS)₄ linker may be substituted for a (GGGGS)₃, (GGGGS)₂, or (GGGGS)₁ linker. For example, also provided are:
[1277] CAR Examples 1a-60a which are identical to those above, except that they are accompanied by the CD34 tag;
[1278] CAR Examples 1b-60b which are identical to those above, except that they have a (GGGGS)₃ linker;
[1279] CAR Examples 1c-60c which are identical to those above, except that they have a (GGGGS)₃ linker and they are accompanied by the CD34 tag;
[1280] CAR Examples 1d-60d which are identical to those above, except that they have a (GGGGS)₂ linker;
[1281] CAR Examples 1e-60e which are identical to those above, except that they have a (GGGGS)₂ linker and they are accompanied by the CD34 tag;
[1282] CAR Examples 1f-60f which are identical to those above, except that they have a (GGGGS) linker; and
[1283] CAR Examples 1g-60g which are identical to those above, except that they have a (GGGGS) linker and they are accompanied by the CD34 tag.

### Example 7: CAR-Bearing Immune Effector Cells

[1284] CAR-bearing immune effector cells may be constructed, optionally with a genome editing step to effect deletion or suppression of one or more surface proteins. Such surface proteins many include, for example, those that form part of the TCR complex, which may induce GvHD if the cells are administered to patients in the allogeneic setting, or those that are the target antigen of the CAR, which may induce fratricide if expression of the antigen on CAR-T is not suppressed.

[1285] For example, in one protocol, on Day 0, CD4+ CD8+ T cells are thawed in a cell culture media. The required number of cells are centrifuged at 200×g for 10 minutes at room temperature. Supernatant is removed completely, cells resuspended cell culture media (TexMacs) supplemented with IL-7 (10 ng/ml) and IL-15 (10 ng/ml) at concentration of 1×10⁶/ml. T cells are stimulated with Miltenyi research grade TransAct™ (10 μl/ml).

[1286] On day 1, the required amount of viral vector comprising CAR is added to the activated cells at the required M.O.I (Multiplicity of Infection). Cells and virus are mixed and placed back in incubator at 37° C.

TABLE 12

| CAR-T | | | | | | |
|---|---|---|---|---|---|---|
| Exam- | | | Stimu- | | | |
| ple | Name | Media | lation | Cas9 p | gRNA | Virus |
| 1 | NTD | TexMacs | T Cell | — | — | — |
| | | | TransA | | | |
| | | | ct ™TM | | | |
| | | | (10 μl/ml) | | | |
| 2 | CART- | TexMacs | T Cell | | | CAR- |
| | CD33 | | TransA | | | CD33 |
| | | | ct ™ | | | |
| | | | (50 μl) | | | |
| 3 | CART- | TexMacs | T Cell | | | CAR- |
| | CD33^{G69} | | TransA | | | CD33^{G69} |
| | | | ct TM | | | |
| | | | (50 μl) | | | |
| 4 | CART- | TexMacs | T Cell | | | CAR- |
| | CD33^{R69} | | TransA | | | CD33^{R69} |
| | | | ct ™ | | | |
| | | | (50 μl) | | | |
| 5 | UCART- | TexMacs | T Cell | 10 μg | 20 μg | CAR- |
| | CD33 | | TransA | | TRAC | CD33 |
| | | | ct ™ | | | |
| | | | (50 μl) | | | |
| 6 | UCART- | TexMacs | T Cell | 10 μg | 20 μg | CAR- |
| | CD33^{G69} | | TransA | | TRAC | CD33^{G69} |
| | | | ct ™ | | | |
| | | | (50 μl) | | | |
| 7 | UCART- | TexMacs | T Cell | 10 μg | 20 μg | CAR- |
| | CD33^{R69} | | TransA | | TRAC | CD33^{R69} |
| | | | ct ™ | | | |
| | | | (50 μl) | | | |
| 8 | CART- | TexMacs | T Cell | | | CAR- |
| | CLL-1 | | TransA | | | CLL-1 |
| | | | ct ™ | | | |
| | | | (50 μl) | | | |
| 9 | CART- | TexMacs | T Cell | | | CAR- |
| | CLL-1^{K244} | | TransA | | | CLL-1^{K244} |
| | | | ct ™ | | | |
| | | | (50 μl) | | | |
| 10 | CART- | TexMacs | T Cell | | | CAR- |
| | CLL-^{1Q244} | | TransA | | | CLL-1^{Q244} |
| | | | ct ™ | | | |
| | | | (50 μl) | | | |
| 11 | UCART- | TexMacs | T Cell | 10 μg | 20 μg | CAR- |
| | CLL-1 | | TransA | | TRAC | CLL-1 |
| | | | ct ™ | | | |
| | | | (50 μl) | | | |
| 12 | UCART- | TexMacs | T Cell | 10 μg | 20 μg | CAR- |
| | CLL-1^{K244} | | TransA | | TRAC | CLL-1^{K244} |
| | | | ct ™ | | | |
| | | | (50 μl) | | | |
| 13 | UCART- | TexMacs | T Cell | 10 μg | 20 μg | CAR- |
| | CLL-1^{Q244} | | TransA | | TRAC | CLL-1^{Q244} |
| | | | ct ™ | | | |
| | | | (50 μl) | | | |

[1287] On day 3, activated cells are washed to remove stimulation.

[1288] If genome editing is desired, cells are harvested and counted. The required number of cells are centrifuged at 100×g for 10 minutes at room temperature. Supernatant is removed completely, cells resuspended in Electroporation buffer (1 ml) (e.g. Maxcyte EP buffer) and transferred to a microcentrifuge tube, and centrifuged at 100×g for 10 minutes at room temperature. Supernatant is removed completely, and cells then resuspended in electroporation buffer (e.g., MaxCyte EP buffer), at the desired concentration (e.g. 5×10⁷/ml).

[1289] Commercially available Cas9 Protein (10 μg) and commercially synthesized gRNA (20 μg) are complexed at room temperature for 10 minutes.

[1290] Cells (100 μl) are transferred to the tube containing complexed Cas9/gRNA, gently mixed, and everything transferred into a MaxCyte OC100 cuvette. Electroporation is thereafter commenced using Maxcyte program Expanded T cell 2. After this procedure, the activated cells may be transferred to 10 ml of pre-warmed media and returned to the incubator to expand for an additional 7-12 days.

[1291] FACS analysis may be used to show the purity of CAR-transduced cells (CAR expression and target gene deletion).

### Example 8: In Vitro Cell Killing Assay

[1292] Target AML cell lines may be obtained from commercially vendors (ATCC). Target expression was confirmed by FACS analysis and target cell genotype obtained through DNA sequencing. Cells were modified to express CBR-GFP (Click beetle luciferase and Green Fluorescent Protein). Jurkat cells (target negative) were engineered to over express either the CD33^{G69} variant or CD33^{R69} variant in conjunction with a CD90.1 marker to enable discrimination by FACS in a target protein independent manor. Target cells were co-incubated with:
[1293] CART33^{ARG69} comprising an antigen-recognition domain comprising the V_{H} and V_{L} domains disclosed in polypeptide no. 6, or
[1294] CART33^{GLY69} comprising an antigen-recognition domain comprising the V_{H} and V_{L} domains disclosed in polypeptide no. 30; or
[1295] positive control, variant nonspecific CART33,
   at a range of effector to target cell ratio ranging from, e.g., E:T 2:1 to E:T 1:32 for 24 hours prior to FACS analysis. Absolute cell counts of viable target cells were quantified by flow cytometry (attune using absolute counts in a defined volume). Percent cytotoxicity is defined as viable targets relative to tumor only controls. Data was analyzed using FlowJo V10.

[1296] Results are shown in FIG. 4 and FIG. 5. CART33^{ARG69} effectively kill CD33^{ARG69} targets but not CD33^{GLY69} targets. CART33^{GLY69} effectively kill CD33^{GLY69} targets but not CD33^{ARG69} targets. CART33 kill both CD33^{ARG69} and CD33^{GLY69} targets.

[1297] The above assay may be repeated with other CAR cells comprising alternate polypeptides and cells expressing the appropriate targets, and may be varied according to methods known in the art; for example, different ratios of effector to target may be used. It is expected that in further experiments of this type, cells expressing polymorphically selective CARS will kill cells expressing the selected target polymorph.

[1298] For example, CART33 will kill CD33+ targets independent of the CD33 genotype (CD33^{R69} or CD33^{G69}). CART-CD33^{G69} is expected to kill CD33^{G69} targets (e.g., HL60, KG1a, or Jurkat CD33^{G69}), but not kill CD33^{R69} targets (e.g., TF1, THP1, or Jurkat CD33^{R69}). CART-CD33^{R69} is expected to kill CD33^{R69} targets (e.g., TF1, THP1 or Jurkat CD33^{R69}), but not kill CD33^{G69} targets (e.g., HL60, KG1a, Jurkat CD33G69).

[1299] Similarly, cells expressing polymorphically selective CARS targeting polymorphisms of FLT3 and CLL1 will kill cells expressing the selected target polymorph, and will spare cells expressing the other polymorph. CART-FLT3 will kill FLT3+ targets independent of the FLT3 genotype (FLT3^{T227} or FLT3^{M227}). CART-FLT3^{M227} is expected to kill FLT3M227 targets (e.g., Jurkat FLT3M²²⁷), but not kill FLT3T²²⁷ targets (e.g., Jurkat FLT3T²²⁷). CART-FLT3T²²⁷ is expected to kill FLT3T²²⁷ targets (e.g., Jurkat FLT3T²²⁷), but not kill FLT3M227 targets (e.g., Jurkat FLT3^{M227}). CART-CLL1 will kill CLL1+ targets independent of the CLL1 genotype (CLL1^{K244} or CLL1^{Q244}). CART-CLL1^{Q244} is expected to kill CLL1^{Q244} targets (e.g., Jurkat CLL1^{Q244}), but not kill CLL1^{K244} targets (e.g., Jurkat CLL1^{K244}). CART-CLL1^{K244} is expected to kill CLL1^{K244} targets (e.g., Jurkat CLL1^{K244}), but not kill CLL1244 targets (e.g., Jurkat CLL1^{Q244}).

### Example 9: AML Cell Line Xenograft Model of CAR-T Activity

[1300] Six to ten week old immunodeficient NOD.Cg-Prkdcscid Il2rgtm1Wjl Tg(CMV-IL3,CSF2,KITLG)1Eav/MloySzJ (NSG-SGM3) mice may be used in murine patient-derived xenograft experiments. Both male and female mice may be used in experiments and randomly assigned to a treatment group.

[1301] Target AML cell lines may be obtained from commercially vendors (ATCC). Target expression is confirmed by FACS analysis and target cell genotype obtained through DNA sequencing. Cells were modified to express CBR-GFP (Click beetle luciferase and Green Fluorescent Protein).

[1302] Mice are engrafted with an appropriate amount, e.g., 1×10⁶ cells on day −7 followed by infusion of an appropriate amount, e.g., 2×10⁶ CAR-T cells and appropriate controls on day 0.

[1303] For example, a CD33^{G69} AML Cell line, KG1a, may be engrafted into mice and treated with either CD33^{G69} CAR-T cells or CD33^{R69} CAR-T cells, a positive control (CD33 CAR-T cells) or a negative control (e.g., CAR negative T cells).

[1304] Tumor burden may be monitored by bioluminescent imaging (BLI) weekly. Mice will be monitored for survival. Bone marrow may be extracted from mice and tumor burden assessed using FACS.

[1305] It is expected that CART33 (positive control) will kill CD33+ targets independent of the CD33 genotype (CD33^{R69} or CD33^{G69}), reduce tumor burden, and prolong survival. CART-CD33^{G69} is expected to kill CD33^{G69} targets (e.g., HL60 or KG1a), reduce tumor burden, and prolong survival of mice. CD33^{R69} targets (e.g., TF1, THP1, or Jurkat CD33^{R69}) would not be killed by CART-CD33^{G69} and thus CART-CD33^{G69} would not offer a survival advantage or reduce tumor burden. CART-CD33^{R69} is expected to kill CD33^{R69} targets (e.g., TF1 or THP1), reduce tumor burden, and prolong survival of mice. CART-CD33^{R69} is not expected to kill CD33^{G69} targets (e.g., HL60 or KG1a) and thus CART-CD33^{R69} would not offer a survival advantage or reduce tumor burden in mice bearing CD33^{G69} target cell lines.

### Example 10: AML Cell Line Humanized Xenograft Model of CAR-T Activity

[1306] Human CD34+ hematopoietic stem cell-engrafted NOD.Cg-Prkdcscid Il2rgtm1Wjl Tg(CMV-IL3,CSF2,KITLG)1Eav/MloySzJ (CD34+ hu-NSG-SGM3) mice may be used in patient-derived xenograft experiments. Both male and female mice may be used in experiments and randomly assigned to a treatment group.

[1307] Mice are bled and the engrafted human cells genotyped using PCR based sequencing to determine the phenotype of the polymorphic target.

[1308] Target AML cell lines may be obtained from commercially vendors (ATCC). Target expression is confirmed by FACS analysis and target cell genotype obtained through DNA sequencing. Cells were modified to express CBR-GFP (Click beetle luciferase and Green Fluorescent Protein).

[1309] Mice are engrafted with, an appropriate amount, e.g., 1×10⁶ AML cells 8-10 weeks following CD34 cord blood engraftment, followed by infusion of an appropriate amount, e.g., 2×10⁶ CAR-T cells and appropriate controls on day 0.

[1310] For example, a CD33^{G69} AML Cell line, KG1a, may be engrafted into humanized CD34+ CD33^{R69} mice and treated with either CD33^{G69} CAR-T cells or CD33^{R69} CAR-T cells, a positive control (CD33 CAR-T cells) or a negative control (e.g., CAR negative T cells).

[1311] Tumor burden may be monitored by bioluminescent imaging (BLI) weekly. Mice may be monitored for survival. Bone marrow may be extracted from mice and tumor burden assessed using FACS. CD33 expression on engrafted cord blood derived cells, obtained from the blood, spleen and bone marrow of mice will be analyzed by FACS. Red blood cells are lysed using Red Blood Cell Lysing Buffer (Sigma-Aldrich) and washed with ice cold PBS. Samples were prepared for flow cytometry by re-suspending cells in staining buffer (PBS supplemented with 0.5% bovine serum albumin and 2 mM EOTA) and incubating for 30 min at 4° C. with pre-titrated saturating dilutions of appropriate fluorochrome-labeled monoclonal antibodies. Data may be analyzed using FlowJo V10.

[1312] It is expected that CART33 (positive control) will kill CD33+ targets independent of the CD33 genotype (CD33^{R69}+ or CD33^{G69}) and reduce tumor burden, but also lose human engrafted hematopoietic cells. CART-CD33^{G69} is expected to kill CD33^{G69} targets (e.g., HL60 or KG1a) and not kill CD33^{R69} engrafted stem cells, prolonging survival by reducing tumor burden while maintaining human hematopoietic cells. CART-CD33^{R69} is expected to kill CD33^{R69} targets (e.g., TF1, THP) and not kill CD33^{G69} engrafted stem cells, prolonging survival by reducing tumor burden while maintaining human hematopoietic cells. Mice which have the same CD33 variant on both AML and engrafted stem cells would be expected have a reduced tumor burden but fail to maintain human hematopoietic cells.

### Example 11: Patient-Derived Xenograft Model of CAR-T Activity

[1313] Six to ten week old immunodeficient NOD.Cg-Prkdcscid Il2rgtm1Wjl Tg(CMV-IL3,CSF2,KITLG)1Eav/MloySzJ (NSG-SGM3) mice may be used in murine patient-derived xenograft experiments. Both male and female mice may be used in experiments and randomly assigned to a treatment group.

[1314] Xenografts of human hematologic cancers, e.g. AML, may be obtained from a variety of sources known in the art including, for example, the Public Repository of Xenografts (PRoXe, www.PRoXe.org). Mice are engrafted with an appropriate amount, e.g., 1×10⁶ cells on day −7 followed by infusion of an appropriate amount, e.g., 2×10⁶ CAR-T cells and appropriate controls on day 0.

[1315] For example, a CD33^{R69} AML xenograft may be engrafted into mice and treated with either CD33^{G69} CAR-T cells or CD33^{R69} CAR-T cells, or a negative control (e.g., CAR negative T cells).

[1316] Peripheral blood and spleens are analyzed by flow cytometry after two weeks, four weeks and six weeks post CAR-T infusion. Red blood cells are lysed using Red Blood Cell Lysing Buffer (Sigma-Aldrich) and washed with ice cold PBS. Samples were prepared for flow cytometry by re-suspending cells in staining buffer (PBS supplemented with 0.5% bovine serum albumin and 2 mM EDTA) and incubating for 30 min at 4° C. with pre-titrated saturating dilutions of appropriate fluorochrome-labeled monoclonal antibodies. Data may be analyzed using FlowJo V10.

[1317] It is expected that CD33^{R69} CAR-T would kill engrafted CD33^{R69} AML cells, reducing tumor burden and prolonging survival. It is expected that CD33^{G69} CAR-T would be unable to kill engrafted CD33^{R69} AML cells and would offer no survival advantage or reduction in tumor burden. If the engrafted AML was heterozygous, expressing both CD33^{R69} and CD33^{G69}, both CD33^{G69} CAR-T and CD33^{R69} CAR-T would be effective at killing the engrafted primary AML, prolonging survival of mice.

### Example 12: AML Cell Line In Vitro CAR-NK Activity

[1318] Target AML cell lines may be obtained from commercial vendors (ATCC). Target expression was confirmed by FACS analysis and target cell genotype obtained through DNA sequencing.

[1319] For example, a CD33^{G69} AML Cell line (such as KG1a or HL60), and CD33^{R69} AML cell lines (such as TF1 or THP1) may be cultured in vitro.

[1320] NK cells engineered to express scFv-CARs to CD33^{R69} would then be added to the CD33^{R69} or CD33^{G69} cells in culture for 4-24 hours. After culture, death of the CD33^{R69} cells would be expected to be enhanced, while death of CD33^{G69} cells would be no higher than background killing by unmodified NK cells. scFv-CAR NKs to CD33^{G69} would be expected to kill CD33^{G69} cells but would not be enhanced in killing CD33^{R69} cells. As a positive control, an anti-CD33 CAR could be used, and as a negative control, NK cells alone could be used.

[1321] Alternatively, NK cells could be cultured in the presence of CD33^{R69} or CD33^{G69} AML cell lines and in the presence of an antibody with a human IgG1 or IgG3 isotype targeting CD33^{R69}. After co-culture, the death of the AML cell lines would be assessed, and would be expected to be higher for CD33^{R69} AML cells. As a positive control, an anti-CD33 antibody could be used, and as a negative control, NK cells alone could be used.

[1322] It is expected that CARNK33 (positive control) will kill CD33+ targets independent of the CD33 genotype of the AML (CD33^{R69} or CD33^{G69}). CARNK-CD33^{G69} is expected to kill CD33^{G69} targets (e.g., HL60 or KG1a). CD33^{R69} targets (e.g., TF1 or THP1) would not be killed by CARNK-CD33^{G69} and thus CARNK-CD33^{G69} would not be enhanced in this in vitro assay. CARNK-CD33^{R69} is expected to kill CD33^{R69} targets (e.g., TF1 or THP1). CARNK-CD33^{R69} is not expected to kill CD33^{G69} targets (e.g., HL60 or KG1a) and thus CARNK-CD33^{R69} would not be enhanced in this in vitro assay.

[1323] It is expected that treatment comprising administration of NK cells together with an anti-CD33 antibody (positive control) will kill CD33+ targets independent of the CD33 genotype of the AML (CD33^{R69} or CD33^{G69}). NK cells cultured with an anti-CD33^{G69} antibody are expected to kill CD33^{G69} targets (e.g., HL60 or KG1a). CD33^{R69} targets (e.g., TF1 or THP1) would not be killed by NK cells cultured with an anti-CD33^{G69} antibody and thus NK cells administered with an anti-CD33^{G69} antibody would not increase AML cell death in this assay against CD33^{R69} target cell lines. NK cells administered with an anti-CD33^{R69} antibody are expected to kill CD33^{R69} targets (e.g., TF1 or THP1). NK cells cultured with an anti-CD33^{R69} antibody are not expected to kill CD33^{G69} targets (e.g., HL60 or KG1a) and thus NK cells administered with an anti-CD33^{R69} antibody would not increase AML cell death in this assay against CD33^{G69} target cell lines.

### Example 13: AML Cell Line Xenograft Model of CAR-NK Activity

[1324] Six to ten week old immunodeficient NOD.Cg-Prkdcscid Il2rgtm1Wjl Tg(CMV-IL3,CSF2,KITLG)1Eav/MloySzJ (NSG-SGM3) mice may be used in murine patient-derived xenograft experiments. Both male and female mice may be used in experiments and randomly assigned to a treatment group.

[1325] Target AML cell lines may be obtained from commercially vendors (ATCC). Target expression was confirmed by FACS analysis and target cell genotype obtained through DNA sequencing. Cells were modified to express CBR-GFP (Click beetle luciferase and Green Fluorescent Protein).

[1326] Mice are engrafted with an appropriate amount, e.g., 1×10⁶ cells on day −7 followed by infusion of an appropriate amount, e.g., 5×10⁶ CAR-NK or NK cells and appropriate controls on day 0.

[1327] For example, a CD33^{G69} AML Cell line, KG1a, may be engrafted into mice and treated with either CD33^{G69} CAR-NK cells or CD33^{R69} CAR-NK cells, a positive control (CD33 CAR-NK cells) or a negative control (e.g., CAR negative NK cells).

[1328] Alternatively, a CD33^{R69} AML Cell line, TF1 may be engrafted into mice and treated with either NK cells co-administered with CD33^{G69} or CD33^{R69}-directed antibodies of the human IgG1 or human IgG3 isotype, a positive control (NK cells with a general anti-CD33 antibody) or a negative control (e.g., NK cells only).

[1329] Tumor burden may be monitored by bioluminescent imaging (BLI) weekly and bone. Mice will be monitored for survival. Bone marrow may be extracted from mice and tumor burden assessed using FACS.

[1330] It is expected that CARNK33 (positive control) will kill CD33+ targets independent of the CD33 genotype of the AML (CD33^{R69} or CD33^{G69}), reduce tumor burden and prolong survival. CARNK-CD33^{G69} is expected to kill CD33^{G69} targets (e.g., HL60 or KG1a), reduce tumor burden, and prolong survival of mice. CD33^{R69} targets (e.g., TF1 or THP1) would not be killed by CARNK-CD33^{G69} and thus CARNK-CD33^{G69} would not offer a survival advantage or reduce tumor burden. CARNK-CD33^{R69} is expected to kill CD33^{R69} targets (e.g., TF1 or THP1), reduce tumor burden, and prolong survival of mice. CARNK-CD33^{R69} is not expected to kill CD33^{G69} targets (e.g., HL60 or KG1a) and thus CARNK-CD33^{R69} would not offer a survival advantage or reduce tumor burden in mice bearing CD33^{G69} target cell lines.

[1331] It is expected that treatment comprising administration of NK cells together with an anti-CD33 antibody (positive control) will kill CD33+ targets independent of the CD33 genotype of the AML (CD33^{R69} or CD33^{G69}), reduce tumor burden, and prolong survival. NK cells administered with an anti-CD33^{G69} antibody is expected to kill CD33^{G69} targets (e.g., HL60 or KG1a), reduce tumor burden, and prolong survival of mice. CD33^{R69} targets (e.g., TF1 or THP1,) would not be killed by NK cells administered with an anti-CD33^{G69} antibody and thus NK cells administered with an anti-CD33^{G69} antibody would not offer a survival advantage or reduce tumor burden. NK cells administered with an anti-CD33^{R69} antibody are expected to kill CD33^{R69} targets (e.g., TF1 or THP1), reduce tumor burden, and prolong survival of mice. NK cells administered with an anti-CD33^{R69} antibody are not expected to kill CD33^{G69} targets (e.g., HL60 or KG1a) and thus NK cells administered with an anti-CD33^{R69} antibody would not offer a survival advantage or reduce tumor burden in mice bearing CD33^{G69} target cell lines.

### Example 14: Antibodies Comprising scFvs

[1332] Antibodies may be constructed from the scFvs disclosed herein using methods known in the art. For example, antibodies disclosed herein may be generated from expression cassettes of the form:
[1333] I-[(leader)(scFv V_{H})(hCγ1)(hCγ2)(hCγ3)(Cγs)]-|
   in a pFuse IgG1 Fc-fusion protein expression plasmid (e.g., Invivogen) and
[1334]
   |-[(leader)(scFv V_{L})(hC_{κ/λ})]-|
   in a pFuse IgK Fc-fusion protein expression plasmid (e.g., Invivogen).

[1335] Alternatively, an anti-CD33-R69 or anti-CD33-G69 antibody may be generated from an expression cassette of the form:
[1336]
   |-[(leader)(scFv V_{H})(hCγ1)(hCγ2)(hCγ3)(Cγs)]-[P2A]-[(leader)(scFv V_{L})(C_{κ/λ})]-|.
   In either of the foregoing, Cγs may optionally be part of the hCγ3 domain.

[1337] The antibodies may be of various isotypes, the constant domains for which are known in the art. For example, for an IgG1 or IgG4, the sequence components may be as shown in Table 13:

TABLE 13
Human Antibody Fc Components

| | hIgG1 AA | hIgG1 Nucleotide | hIgG4 AA | hIgG4 Nucleotide |
|---|---|---|---|---|
| IL2 | MYRMQLLSCI | atgtacaggatgcaactcctgtcttgcat | MYRMQLLSCI | atgtacaggatgcaactcctgtctt |
| Leader | ALSLALVTNS | tgcactaagtcttgcacttgtcacgaatt | ALSLALVTNS | gcattgcactaagtcttgcacttgtc |
| | SEQ ID | cg | SEQ ID | acgaattcg |
| | NO: 1599 | SEQ ID NO: 1600 | NO: 1601 | SEQ ID NO: 1602 |
| Cy1 | STKGPSVFPLA | tccaccaagggcccatcggtcttcccc | STKGPSVFPL | tccaccaagggcccctccgtgttc |
| | PSSKSTSGGTA | ctggcaccctcctccaagagcacctct | APCSRSTSEST | cccctggccccctgctcccgctcc |
| | ALGCLVKDYF | gggggcacagcggccctgggctgcct | AALGCLVKD | acctccgagtccaccgccgccct |
| | PEPVTVSWNS | ggtcaaggactacttccccgaaccggt | YFPEPVTVSW | gggctgcctggtgaaggactactt |
| | GALTSGVHTF | gacggtgtcgtggaactcaggcgccct | NSGALTSGVH | ccccgagcccgtgaccgtgtcct |
| | PAVLQSSGLY | gaccagcggcgtgcacaccttcccgg | TFPAVLQSSG | ggaactccggcgccctgacctcc |
| | SLSSVVTVPSS | ctgtcctacagtcctcaggactctactcc | LYSLSSVVTV | ggcgtgcacaccttccccgccgt |
| | SLGTQTYICNV | ctcagcagcgtggtgaccgtgccctcc | PSSSLGTKTYT | gctgcagtcctccggcctgtactc |
| | NHKPSNTKVD | agcagcttgggcacccagacctacatc | CNVDHKPSNT | cctgtcctccgtggtgaccgtgcc |
| | KKV | tgcaacgtgaatcacaagcccagcaac | KVDKRV | ctcctcctccctgggcaccaagac |
| | SEQ ID | accaaggtggacaagaaagtt | SEQ ID | ctacacctgcaacgtggaccaca |
| | NO: 1603 | SEQ ID NO: 1604 | NO: 1605 | agccctccaacaccaaggtggac |
| | | | | aagcgcgtg |
| | | | | SEQ ID NO: 1606 |
| Hinge | EPKSCDKTHT | GAGCCCAAATCTTGTGA | SKYGPPCPSCP | tccaaatatggtcccccatgcccat |
| (CH) | CPPCP | CAAAACTCACACATGCC | SEQ ID | catgccca |
| | SEQ ID | CACCGTGCCCA | NO: 1609 | SEQ ID NO: 1610 |
| | NO: 1607 | SEQ ID NO: 1608 | | |
| Cy2 | PELLGGPSVFL | cctgaactcctggggggaccgtcagtc | PEFLGGPSVFL | cctgagttcctggggggaccatca |
| | FPPKPKDTLMI | ttcctcttccccccaaaacccaaggaca | FPPKPKDTLMI | gtcttcctgttccccccaaaaccca |
| | SRTPEVTCVV | ccctcatgatctcccggacccctgaggt | SRTPEVTCVV | aggacactctcatgatctcccgga |
| | VDVSHEDPEV | cacatgcgtggtggtggacgtgagcca | VDVSQEDPEV | cccctgaggtcacgtgcgtggtg |
| | KFNWYVDGV | cgaagaccctgaggtcaagttcaactg | QFNWYVDGV | gtggacgtgagccaggaagacc |
| | EVHNAKTKPR | gtacgtggacggcgtggaggtgcataa | EVHNAKTKPR | ccgaggtccagttcaactggtacg |
| | EEQYNSTYRV | tgccaagacaaagccgcgggaggag | EEQFNSTYRV | tggatggcgtggaggtgcataatg |
| | VSVLTVLHQD | cagtacaacagcacgtaccgtgtggtc | VSVLTVLHQD | ccaagacaaagccgcgggagga |
| | WLNGKEYKC | agcgtcctcaccgtcctgcaccaggac | WLNGKEYKC | gcagttcaacagcacgtaccgtgt |
| | KVSNKALPAPI | tggctgaatggcaaggagtacaagtgc | KVSNKGLPSSI | ggtcagcgtcctcaccgtcctgca |
| | EKTISKAK | aaggtctccaacaaagccctoccagcc | EKTISKAK | ccaggactggctgaacggcaag |
| | SEQ ID | cccatcgagaaaaccatctccaaagcc | SEQ ID | gagtacaagtgcaaggtctccaac |
| | NO: 1611 | aaa | NO: 1613 | aaaggcctcccgtcctccatcgag |
| | | SEQ ID NO: 1612 | | aaaaccatctccaaagccaaa |
| | | | | SEQ ID NO: 1614 |
| Cy3 | QPREPQVYTL | cagccccgagaaccacaggtgtacac | QPREPQVYTL | cagccccgagagccacaggtgta |
| | PPSREEMTKN | cctgcccccatcccgggaggagatga | PPSQEEMTKN | caccctgcccccatcccaggagg |
| | QVSLTCLVKG | ccaagaaccaggtcagcctgacctgcc | QVSLTCLVKG | agatgaccaagaaccaggtcagc |
| | FYPSDIAVEW | tggtcaaaggcttctatcccagcgacat | FYPSDIAVEW | ctgacctgcctggtcaaaggcttct |
| | ESNGQPENNY | cgccgtggagtgggagagcaatgggc | ESNGQPENNY | accccagcgacatcgccgtggag |
| | KTTPPVLDSD | agccggagaacaactacaagaccacg | KTTPPVLDSD | tgggagagcaatgggcagccgg |
| | GSFFLYSKLTV | cctcccgtgctggactccgacggctcct | GSFFLYSRLT | agaacaactacaagaccacgcct |
| | DKSRWQQGN | tcttcctctacagcaagctcaccgtgga | VDKSRWQEG | cccgtgctggactccgacggctc |
| | VFSCSVMHEA | caagagcaggtggcagcaggggaac | NVFSCSVMHE | cttcttcctctacagcaggctaacc |
| | LHNHYTQKSL | gtcttctcatgctccgtgatgcacgagg | ALHNHYTQKS | gtggacaagagcaggtggcagg |
| | SLSP | ctctgcacaaccactacacgcagaaga | LSLSL | aggggaatgtcttctcatgctccgt |
| | SEQ ID | gcctctccctgtctccg | SEQ ID | gatgcatgaggctctgcacaacca |
| | NO: 1615 | SEQ ID NO: 1616 | NO: 1617 | ctacacacagaagagcctctccct |
| | | | | gtctctg |
| | | | | SEQ ID NO: 1618 |
| Secre- | GK | ggtaaatga | GK | ggtaaatga |
| tion | SEQ ID | SEQ ID NO: 1620 | SEQ ID | SEQ ID NO: 1622 |
| (Cs) | NO: 1619 | | NO: 1621 | |
| IgK- | TVAAPSVFIFP | acggtggctgcaccatctgtcttcatctt | TVAAPSVFIFP | acggtggctgcaccatctgtcttca |
| Ck1 | PSDEQLKSGT | cccgccatctgatgagcagttgaaatct | PSDEQLKSGT | tcttcccgccatctgatgagcagtt |
| | ASVVCLLNNF | ggaactgcctctgttgtgtgcctgctga | ASVVCLLNNF | gaaatctggaactgcctctgttgtg |
| | YPREAKVQW | ataacttctatcccagagaggccaaagt | YPREAKVQW | tgcctgctgaataacttctatccca |
| | KVDNALQSGN | acagtggaaggtggataacgccctcca | KVDNALQSG | gagaggccaaagtacagtggaa |
| | SQESVTEQDS | atcgggtaactcccaggagagtgtcac | NSQESVTEQD | ggtggataacgccctccaatcgg |
| | KDSTYSLSSTL | agagcaggacagcaaggacagcacct | SKDSTYSLSST | gtaactcccaggagagtgtcaca |
| | TLSKADYEKH | acagcctcagcagcaccctgacgctga | LTLSKADYEK | gagcaggacagcaaggacagca |
| | KVYACEVTHQ | gcaaagcagactacgagaaacacaaa | HKVYACEVT | cctacagcctcagcagcaccctg |
| | GLSSPVTKSFN | gtctacgcctgcgaagtcacccatcag | HQGLSSPVTK | acgctgagcaaagcagactacga |
| | RGEC | ggcctgagctcgcccgtcacaaagag | SFNRGEC | gaaacacaaagtctacgcctgcg |
| | SEQ ID | cttcaacaggggagagtgttag | SEQ ID | aagtcacccatcagggcctgagct |
| | NO: 1623 | SEQ ID NO: 1624 | NO: 1625 | cgcccgtcacaaagagcttcaac |
| | | | | aggggagagtgttag |
| | | | | SEQ ID NO: 1626 |

[1338] The foregoing may be combined with, for example: a V_{H} domain which has a polypeptide sequence of any of SEQ ID NOs 151-175, and/or a V_{L} domain which has a polypeptide sequence of any of SEQ ID NOs 176-200; a V_{H} domain which has a polypeptide sequence of any of SEQ ID NOs 303-319, and/or a V_{L} domain which has a polypeptide sequence of any of SEQ ID NOs 320-336; a V_{H} domain which has a polypeptide sequence of any of SEQ ID NOs 481-504, and/or a V_{L} domain which has a polypeptide sequence of any of SEQ ID NOs 505-528; or a V_{H} domain which has a polypeptide sequence of any of SEQ ID NOs 661-682, or a nucleotide sequence encoding any of SEQ ID NOs 661-682, and/or a V_{L} domain which has a polypeptide sequence of any of SEQ ID NOs 683-704; or a nucleotide sequence encoding any of the foregoing.

[1339] Additional antibodies may be constructed from V_{H} and V_{L} domains which are nonselective for a particular polymorphism. For example, the elements in Table 13 may be combined, for example, with a V_{H} domain which has a polypeptide sequence of any of SEQ ID NOs 1035-1089, and/or a V_{L} domain which has a polypeptide sequence of any of SEQ ID NOs 1090-1144; or a V_{H} domain which has a polypeptide sequence of any of SEQ ID NOs 1427-1473, and/or a V_{L} domain which has a polypeptide sequence of any of SEQ ID NOs 1474-1520; or a nucleotide sequence encoding any of the foregoing.

[1340] A cloning vector, for example a plasmid, comprising sequence of the foregoing form may be expressed in an appropriate cell line, for example 293F cells; transient transfection is typically sufficient. The 293F cells are grown in IgG free FBS with agitation (e.g., roller bottles), and the supernatant harvested over the course of several (e.g., 5) days. Supernatant is purified using Protein A or G columns and the antibody is recovered using methods known on the art.

[1341] The antibody so generated may comprise V_{H} and V_{L} domains as shown below in Table 14. Antibody (mAb) Examples 1-42 target CD33, and 43-88 target CLL-1.

TABLE 14
IgG1 Antibodies

| | | SEQ | | |
|---|---|---|---|---|
| | | ID | | SEQ |
| mAb Ex | IgG1 Heavy Chain | NO | IgG1 Light Chain | ID NO |
| 1 | QVQLVQSGAEVKKPGASVKVSCKASGYS | 1627 | DIQMTQSPSSLSASV | 1715 |
| | FTGYYIHWVRQAPGQGLEWMGWINPNSG | | GDRVTITCRASQTIN | |
| | GTNYAQKFQGRVTMTRDTSTSTVYMELSS | | DWLAWYQQKPGKA | |
| | LRSEDTAVYYCARDQWDGYNSGYFDYW | | PKLLIYSASTLHSGV | |
| | GQGTLVTVSSSTKGPSVFPLAPSSKSTSGG | | PSRFSGSGSGTDFTL | |
| | TAALGCLVKDYFPEPVTVSWNSGALTSGV | | TISSLQPEDFATYYC | |
| | HTFPAVLQSSGLYSLSSVVTVPSSSLGTQT | | QQAYSTPWTFGQGT | |
| | YICNVNHKPSNTKVDKKVDKTHTCPPCPP | | KVEIKRTVAAPSVFI | |
| | ELLGGPSVFLFPPKPKDTLMISRTPEVTCV | | FPPSDEQLKSGTASV | |
| | VVDVSHEDPEVKFNWYVDGVEVHNAKTK | | VCLLNNFYPREAKV | |
| | PREEQYNSTYRVVSVLTVLHQDWLNGKE | | QWKVDNALQSGNS | |
| | YKCKVSNKALPAPIEKTISKAKQPREPQVY | | QESVTEQDSKDSTYS | |
| | TLPPSREEMTKNQVSLTCLVKGFYPSDIAV | | LSSTLTLSKADYEKH | |
| | EWESNGQPENNYKTTPPVLDSDGSFFLYS | | KVYACEVTHQGLSS | |
| | KLTVDKSRWQQGNVFSCSVMHEALHNHY | | PVTKSFNRGEC | |
| | TQKSLSLSPGK | | | |
| 2 | EVQLLESGGGLVQPGGSLRLSCAASGFTFS | 1628 | DIQMTQSPSSLSASV | 1716 |
| | DYYMSWVRQAPGKGLEWVSGISGSGYST | | GDRVTITCRASQSIS | |
| | YYADSVKGRFTISRDNSKNTLYLQMNSLR | | RYLNWYQQKPGKA | |
| | AEDTAVYYCARTFGRGPDWYFDLWGRGT | | PKLLIYTASTLQSGV | |
| | LVTVSSSTKGPSVFPLAPSSKSTSGGTAAL | | PSRFSGSGSGTDFTL | |
| | GCLVKDYFPEPVTVSWNSGALTSGVHTFP | | TISSLQPEDFATYYC | |
| | AVLQSSGLYSLSSVVTVPSSSLGTQTYICN | | QQYDDLPLTFGGGT | |
| | VNHKPSNTKVDKKVDKTHTCPPCPPELLG | | KVEIKRTVAAPSVFI | |
| | GPSVFLFPPKPKDTLMISRTPEVTCVVVDV | | FPPSDEQLKSGTASV | |
| | SHEDPEVKFNWYVDGVEVHNAKTKPREE | | VCLLNNFYPREAKV | |
| | QYNSTYRVVSVLTVLHQDWLNGKEYKCK | | QWKVDNALQSGNS | |
| | VSNKALPAPIEKTISKAKQPREPQVYTLPPS | | QESVTEQDSKDSTYS | |
| | REEMTKNQVSLTCLVKGFYPSDIAVEWES | | LSSTLTLSKADYEKH | |
| | NGQPENNYKTTPPVLDSDGSFFLYSKLTV | | KVYACEVTHQGLSS | |
| | DKSRWQQGNVFSCSVMHEALHNHYTQKS | | PVTKSFNRGEC | |
| | LSLSPGK | | | |
| 3 | EVQLLESGGGLVQPGGSLRLSCAASGFTFS | 1629 | DIQMTQSPSSLSASV | 1717 |
| | NSDMNWVRQAPGKGLEWVSAISGSGGST | | GDRVTITCRASQSISS | |
| | YYADSVKGRFTISRDNSKNTLYLQMNSLR | | YLNWYQQKPGKAP | |
| | AEDTAVYYCARGREDDYGDYVFDYWGQ | | KLLIYGASTLHSGVP | |
| | GTLVTVSSSTKGPSVFPLAPSSKSTSGGTA | | SRFSGSGSGTDFTLTI | |
| | ALGCLVKDYFPEPVTVSWNSGALTSGVHT | | SSLQPEDFATYYCQQ | |
| | FPAVLQSSGLYSLSSVVTVPSSSLGTQTYIC | | SYRIPYTFGQGTKLEI | |
| | NVNHKPSNTKVDKKVDKTHTCPPCPPELL | | KRTVAAPSVFIFPPS | |
| | GGPSVFLFPPKPKDTLMISRTPEVTCVVVD | | DEQLKSGTASVVCL | |
| | VSHEDPEVKFNWYVDGVEVHNAKTKPRE | | LNNFYPREAKVQWK | |
| | EQYNSTYRVVSVLTVLHQDWLNGKEYKC | | VDNALQSGNSQESV | |
| | KVSNKALPAPIEKTISKAKQPREPQVYTLP | | TEQDSKDSTYSLSST | |
| | PSREEMTKNQVSLTCLVKGFYPSDIAVEW | | LTLSKADYEKHKVY | |
| | ESNGQPENNYKTTPPVLDSDGSFFLYSKLT | | ACEVTHQGLSSPVT | |
| | VDKSRWQQGNVFSCSVMHEALHNHYTQ | | KSFNRGEC | |
| | KSLSLSPGK | | | |
| 4 | QVQLVQSGAEVKKPGASVKVSCKASGGT | 1630 | EIVMTQSPATLSVSP | 1718 |
| | FSSYAISWVRQAPGQGLEWMGWINPNSG | | GERATLSCRASQNIN | |
| | NTGYAQKFQGRVTMTRDTSTSTVYMELSS | | SDLAWYQQKPGQAP | |
| | LRSEDTAVYYCAREHGDMDVWGQGTTVT | | RLLIYGASTRATGIP | |
| | VSSSTKGPSVFPLAPSSKSTSGGTAALGCL | | ARFSGSGSGTEFTLTI | |
| | VKDYFPEPVTVSWNSGALTSGVHTFPAVL | | SSLQSEDFAVYYCQ | |
| | QSSGLYSLSSVVTVPSSSLGTQTYICNVNH | | QYDSLPFTFGPGTKV | |
| | KPSNTKVDKKVDKTHTCPPCPPELLGGPS | | DIKRTVAAPSVFIFPP | |
| | VFLFPPKPKDTLMISRTPEVTCVVVDVSHE | | SDEQLKSGTASVVC | |
| | DPEVKFNWYVDGVEVHNAKTKPREEQYN | | LLNNFYPREAKVQW | |
| | STYRVVSVLTVLHQDWLNGKEYKCKVSN | | KVDNALQSGNSQES | |
| | KALPAPIEKTISKAKQPREPQVYTLPPSREE | | VTEQDSKDSTYSLSS | |
| | MTKNQVSLTCLVKGFYPSDIAVEWESNGQ | | TLTLSKADYEKHKV | |
| | PENNYKTTPPVLDSDGSFFLYSKLTVDKSR | | YACEVTHQGLSSPV | |
| | WQQGNVFSCSVMHEALHNHYTQKSLSLS | | TKSFNRGEC | |
| | PGK | | | |
| 5 | QVQLVQSGAEVKKPGASVKVSCKASGNT | 1631 | DIVMTQSPLSLPVTP | 1719 |
| | FTSYGISWVRQAPGQGLEWMGWINPNSG | | GEPASISCRSSQSLLH | |
| | GTKYAQKFQGRVTMTRDTSTSTVYMELSS | | SNGYNYLDWYLQKP | |
| | LRSEDTAVYYCARESWFGELYYGMDVWG | | GQSPQLLIYLGSDRA | |
| | KGTTVTVSSSTKGPSVFPLAPSSKSTSGGT | | SGVPDRFSGSGSGTD | |
| | AALGCLVKDYFPEPVTVSWNSGALTSGVH | | FTLKISRVEAEDVGV | |
| | TFPAVLQSSGLYSLSSVVTVPSSSLGTQTYI | | YYCMQGLQTPITFG | |
| | CNVNHKPSNTKVDKKVDKTHTCPPCPPEL | | QGTRLEIKRTVAAPS | |
| | LGGPSVFLFPPKPKDTLMISRTPEVTCVVV | | VFIFPPSDEQLKSGT | |
| | DVSHEDPEVKFNWYVDGVEVHNAKTKPR | | ASVVCLLNNFYPRE | |
| | EEQYNSTYRVVSVLTVLHQDWLNGKEYK | | AKVQWKVDNALQS | |
| | CKVSNKALPAPIEKTISKAKQPREPQVYTL | | GNSQESVTEQDSKD | |
| | PPSREEMTKNQVSLTCLVKGFYPSDIAVE | | STYSLSSTLTLSKAD | |
| | WESNGQPENNYKTTPPVLDSDGSFFLYSK | | YEKHKVYACEVTHQ | |
| | LTVDKSRWQQGNVFSCSVMHEALHNHYT | | GLSSPVTKSFNRGEC | |
| | QKSLSLSPGK | | | |
| 6 | QVQLVQSGAEVKKPGASVKVSCKASGYT | 1632 | DIQMTQSPSSLSASV | 1720 |
| | FTAYYTHWVRQAPGQGLEWMGWMNPNS | | GDRVTITCRASQSISS | |
| | GHTSYAQKFQGRVTMTRDTSTSTVYMELS | | YLNWYQQKPGKAP | |
| | SLRSEDTAVYYCAREAYDSFDYWGQGTL | | KLLIYEASTLETGVP | |
| | VTVSSSTKGPSVFPLAPSSKSTSGGTAALG | | SRFSGSGSGTDFTLTI | |
| | CLVKDYFPEPVTVSWNSGALTSGVHTFPA | | SSLQPEDFATYYCQQ | |
| | VLQSSGLYSLSSVVTVPSSSLGTQTYICNV | | ANSFPFTFGPGTKVD | |
| | NHKPSNTKVDKKVDKTHTCPPCPPELLGG | | IKRTVAAPSVFIFPPS | |
| | PSVFLFPPKPKDTLMISRTPEVTCVVVDVS | | DEQLKSGTASVVCL | |
| | HEDPEVKFNWYVDGVEVHNAKTKPREEQ | | LNNFYPREAKVQWK | |
| | YNSTYRVVSVLTVLHQDWLNGKEYKCKV | | VDNALQSGNSQESV | |
| | SNKALPAPIEKTISKAKQPREPQVYTLPPSR | | TEQDSKDSTYSLSST | |
| | EEMTKNQVSLTCLVKGFYPSDIAVEWESN | | LTLSKADYEKHKVY | |
| | GQPENNYKTTPPVLDSDGSFFLYSKLTVD | | ACEVTHQGLSSPVT | |
| | KSRWQQGNVFSCSVMHEALHNHYTQKSL | | KSFNRGEC | |
| | SLSPGK | | | |
| 7 | QVQLVQSGAEVKKPGASVKVSCKASGYT | 1633 | DIQMTQSPSSLSASV | 1721 |
| | FTDYYMHWVRQAPGQGLEWMGWINPNS | | GDRVTITCRASRGIN | |
| | GGTNYAQKFQGRVTMTRDTSTSTVYMEL | | NWLTWYQQKPGKA | |
| | SSLRSEDTAVYYCARDSRIAVAASSFDYW | | PKLLIYGASSLQSGV | |
| | GQGTLVTVSSSTKGPSVFPLAPSSKSTSGG | | PSRFSGSGSGTDFTL | |
| | TAALGCLVKDYFPEPVTVSWNSGALTSGV | | TISSLQPEDFATYYC | |
| | HTFPAVLQSSGLYSLSSVVTVPSSSLGTQT | | QQSYRIPYTFGQGTK | |
| | YICNVNHKPSNTKVDKKVDKTHTCPPCPP | | LEIKRTVAAPSVFIFP | |
| | ELLGGPSVFLFPPKPKDTLMISRTPEVTCV | | PSDEQLKSGTASVVC | |
| | VVDVSHEDPEVKFNWYVDGVEVHNAKTK | | LLNNFYPREAKVQW | |
| | PREEQYNSTYRVVSVLTVLHQDWLNGKE | | KVDNALQSGNSQES | |
| | YKCKVSNKALPAPIEKTISKAKQPREPQVY | | VTEQDSKDSTYSLSS | |
| | TLPPSREEMTKNQVSLTCLVKGFYPSDIAV | | TLTLSKADYEKHKV | |
| | EWESNGQPENNYKTTPPVLDSDGSFFLYS | | YACEVTHQGLSSPV | |
| | KLTVDKSRWQQGNVFSCSVMHEALHNHY | | TKSFNRGEC | |
| | TQKSLSLSPGK | | | |
| 8 | EVQLLESGGGLVQPGGSLRLSCAASGFTFS | 1634 | DIQMTQSPSSLSASV | 1722 |
| | SYAMSWVRQAPGKGLEWVSDISGSGSGT | | GDRVTITCRASQSVS | |
| | YYADAVKGRFTISRDNSKNTLYLQMNSLR | | SFLNWYQQKPGKAP | |
| | AEDTAVYYCARPGSDGEFDYWGQGTLVT | | KLLIYAASSLQSGVP | |
| | VSSSTKGPSVFPLAPSSKSTSGGTAALGCL | | SRFSGSGSGTDFTLTI | |
| | VKDYFPEPVTVSWNSGALTSGVHTFPAVL | | SSLQPEDFATYYCQQ | |
| | QSSGLYSLSSVVTVPSSSLGTQTYICNVNH | | SYTTPLTFGQGTKVE | |
| | KPSNTKVDKKVDKTHTCPPCPPELLGGPS | | IKRTVAAPSVFIFPPS | |
| | VFLFPPKPKDTLMISRTPEVTCVVVDVSHE | | DEQLKSGTASVVCL | |
| | DPEVKFNWYVDGVEVHNAKTKPREEQYN | | LNNFYPREAKVQWK | |
| | STYRVVSVLTVLHQDWLNGKEYKCKVSN | | VDNALQSGNSQESV | |
| | KALPAPIEKTISKAKQPREPQVYTLPPSREE | | TEQDSKDSTYSLSST | |
| | MTKNQVSLTCLVKGFYPSDIAVEWESNGQ | | LTLSKADYEKHKVY | |
| | PENNYKTTPPVLDSDGSFFLYSKLTVDKSR | | ACEVTHQGLSSPVT | |
| | WQQGNVFSCSVMHEALHNHYTQKSLSLS | | KSFNRGEC | |
| | PGK | | | |
| 9 | QVQLVQSGAEVKKPGSSVKVSCKASGGTF | 1635 | DIQMTQSPSSLSASV | 1723 |
| | SSDAINWVRQAPGQGLEWMGGFDPEDGE | | GDRVTITCRSSRNIS | |
| | TIYAQKFQGRVTITADESTSTAYMELSSLR | | HWLAWYQQKPGKA | |
| | SEDTAVYYCARGPSGYDFEFDYWGQGTL | | PKLLIYKASSLESGV | |
| | VTVSSSTKGPSVFPLAPSSKSTSGGTAALG | | PSRFSGSGSGTDFTL | |
| | CLVKDYFPEPVTVSWNSGALTSGVHTFPA | | TISSLQPEDFATYYC | |
| | VLQSSGLYSLSSVVTVPSSSLGTQTYICNV | | QQAISFPLTFGGGTK | |
| | NHKPSNTKVDKKVDKTHTCPPCPPELLGG | | VEIKRTVAAPSVFIFP | |
| | PSVFLFPPKPKDTLMISRTPEVTCVVVDVS | | PSDEQLKSGTASVVC | |
| | HEDPEVKFNWYVDGVEVHNAKTKPREEQ | | LLNNFYPREAKVQW | |
| | YNSTYRVVSVLTVLHQDWLNGKEYKCKV | | KVDNALQSGNSQES | |
| | SNKALPAPIEKTISKAKQPREPQVYTLPPSR | | VTEQDSKDSTYSLSS | |
| | EEMTKNQVSLTCLVKGFYPSDIAVEWESN | | TLTLSKADYEKHKV | |
| | GQPENNYKTTPPVLDSDGSFFLYSKLTVD | | YACEVTHQGLSSPV | |
| | KSRWQQGNVFSCSVMHEALHNHYTQKSL | | TKSFNRGEC | |
| | SLSPGK | | | |
| 10 | QVQLVQSGAEVKKPGASVKVSCKASGDT | 1636 | DIVMTQSPDSLAVSL | 1724 |
| | FTTYAISWVRQAPGQGLEWMGWINPNSG | | GERATINCKSSQSVL | |
| | VATYANKFQGRVTMTRDTSTSTVYMELSS | | HSSKNKNYLAWYQ | |
| | LRSEDTAVYYCAREGIVGATDAFDIWGQG | | QKPGQPPKLLIYWAS | |
| | TMVTVSSSTKGPSVFPLAPSSKSTSGGTAA | | TRESGVPDRFSGSGS | |
| | LGCLVKDYFPEPVTVSWNSGALTSGVHTF | | GTDFTLTISSLQAED | |
| | PAVLQSSGLYSLSSVVTVPSSSLGTQTYIC | | VAVYYCQQYFTTPP | |
| | NVNHKPSNTKVDKKVDKTHTCPPCPPELL | | TFGPGTKVDIKRTVA | |
| | GGPSVFLFPPKPKDTLMISRTPEVTCVVVD | | APSVFIFPPSDEQLKS | |
| | VSHEDPEVKFNWYVDGVEVHNAKTKPRE | | GTASVVCLLNNFYP | |
| | EQYNSTYRVVSVLTVLHQDWLNGKEYKC | | REAKVQWKVDNAL | |
| | KVSNKALPAPIEKTISKAKQPREPQVYTLP | | QSGNSQESVTEQDS | |
| | PSREEMTKNQVSLTCLVKGFYPSDIAVEW | | KDSTYSLSSTLTLSK | |
| | ESNGQPENNYKTTPPVLDSDGSFFLYSKLT | | ADYEKHKVYACEVT | |
| | VDKSRWQQGNVFSCSVMHEALHNHYTQ | | HQGLSSPVTKSFNRG | |
| | KSLSLSPGK | | EC | |
| 11 | QVQLVQSGAEVKKPGASVKVSCKASGDT | 1637 | DIQMTQSPSSLSASV | 1725 |
| | FTNHYMHWVRQAPGQGLEWMGWINPNS | | GDRVTITCRASQSLG | |
| | GGTNYAQKFQGRVTMTRDTSTSTVYMEL | | SWLAWYQQKPGKA | |
| | SSLRSEDTAVYYCARDLVPAAVGGYFDY | | PKLLIYAASSLQSGV | |
| | WGQGTLVTVSSSTKGPSVFPLAPSSKSTSG | | PSRFSGSGSGTDFTL | |
| | GTAALGCLVKDYFPEPVTVSWNSGALTSG | | TISSLQPEDFATYYC | |
| | VHTFPAVLQSSGLYSLSSVVTVPSSSLGTQ | | QQANSFPLTFGQGT | |
| | TYICNVNHKPSNTKVDKKVDKTHTCPPCP | | KVEIKRTVAAPSVFI | |
| | PELLGGPSVFLFPPKPKDTLMISRTPEVTCV | | FPPSDEQLKSGTASV | |
| | VVDVSHEDPEVKFNWYVDGVEVHNAKTK | | VCLLNNFYPREAKV | |
| | PREEQYNSTYRVVSVLTVLHQDWLNGKE | | QWKVDNALQSGNS | |
| | YKCKVSNKALPAPIEKTISKAKQPREPQVY | | QESVTEQDSKDSTYS | |
| | TLPPSREEMTKNQVSLTCLVKGFYPSDIAV | | LSSTLTLSKADYEKH | |
| | EWESNGQPENNYKTTPPVLDSDGSFFLYS | | KVYACEVTHQGLSS | |
| | KLTVDKSRWQQGNVFSCSVMHEALHNHY | | PVTKSFNRGEC | |
| | TQKSLSLSPGK | | | |
| 12 | EVQLLESGGGLVQPGGSLRLSCAASGFTFS | 1638 | DIQMTQSPSSLSASV | 1726 |
| | SHWMSWVRQAPGKGLEWVSAISGSGGST | | GDRVTITCQASQDID | |
| | YYADSVKGRFTISRDNSKNTLYLQMNSLR | | NYLNWYQQKPGKA | |
| | AEDTAVYYCARDDNSGSQADWGQGTLVT | | PKLLIYDASNLETGV | |
| | VSSSTKGPSVFPLAPSSKSTSGGTAALGCL | | PSRFSGSGSGTDFTL | |
| | VKDYFPEPVTVSWNSGALTSGVHTFPAVL | | TISSLQPEDFATYYC | |
| | QSSGLYSLSSVVTVPSSSLGTQTYICNVNH | | QQSYSTPLTFGGGTK | |
| | KPSNTKVDKKVDKTHTCPPCPPELLGGPS | | LEIKRTVAAPSVFIFP | |
| | VFLFPPKPKDTLMISRTPEVTCVVVDVSHE | | PSDEQLKSGTASVVC | |
| | DPEVKFNWYVDGVEVHNAKTKPREEQYN | | LLNNFYPREAKVQW | |
| | STYRVVSVLTVLHQDWLNGKEYKCKVSN | | KVDNALQSGNSQES | |
| | KALPAPIEKTISKAKQPREPQVYTLPPSREE | | VTEQDSKDSTYSLSS | |
| | MTKNQVSLTCLVKGFYPSDIAVEWESNGQ | | TLTLSKADYEKHKV | |
| | PENNYKTTPPVLDSDGSFFLYSKLTVDKSR | | YACEVTHQGLSSPV | |
| | WQQGNVFSCSVMHEALHNHYTQKSLSLS | | TKSFNRGEC | |
| | PGK | | | |
| 13 | QVQLVQSGAEVKKPGASVKVSCKASGYS | 1639 | DIQMTQSPSSLSASV | 1727 |
| | FTGYYMHWVRQAPGQGLEWMGWINPNS | | GDRVTITCRASQGIR | |
| | GGTYFAQNFQGRVTMTRDTSTSTVYMELS | | NWLAWYQQKPGKA | |
| | SLRSEDTAVYYCVKDRGDRVVTSYLDYW | | PKLLIYAASSLQSGV | |
| | GQGTLVTVSSSTKGPSVFPLAPSSKSTSGG | | PSRFSGSGSGTDFTL | |
| | TAALGCLVKDYFPEPVTVSWNSGALTSGV | | TISSLQPEDFATYYC | |
| | HTFPAVLQSSGLYSLSSVVTVPSSSLGTQT | | QQSYRTPYTFGQGT | |
| | YICNVNHKPSNTKVDKKVDKTHTCPPCPP | | KLEIKRTVAAPSVFIF | |
| | ELLGGPSVFLFPPKPKDTLMISRTPEVTCV | | PPSDEQLKSGTASVV | |
| | VVDVSHEDPEVKFNWYVDGVEVHNAKTK | | CLLNNFYPREAKVQ | |
| | PREEQYNSTYRVVSVLTVLHQDWLNGKE | | WKVDNALQSGNSQE | |
| | YKCKVSNKALPAPIEKTISKAKQPREPQVY | | SVTEQDSKDSTYSLS | |
| | TLPPSREEMTKNQVSLTCLVKGFYPSDIAV | | STLTLSKADYEKHK | |
| | EWESNGQPENNYKTTPPVLDSDGSFFLYS | | VYACEVTHQGLSSP | |
| | KLTVDKSRWQQGNVFSCSVMHEALHNHY | | VTKSFNRGEC | |
| | TQKSLSLSPGK | | | |
| 14 | QVQLVQSGAEVKKPGASVKVSCKASGYT | 1640 | DIVMTQSPDSLAVSL | 1728 |
| | FTGYYMHWVRQAPGQGLEWMGIINPSGG | | GERATINCKSSQSVL | |
| | STSYAQKFQGRVTMTRDTSTSTVYMELSS | | YSSNNKNYLAWYQ | |
| | LRSEDTAVYYCARAAPYYYDSSGYYSGG | | QKPGQPPKLLIYWAS | |
| | YYFDYWGQGTLVTVSSSTKGPSVFPLAPS | | TRESGVPDRFSGSGS | |
| | SKSTSGGTAALGCLVKDYFPEPVTVSWNS | | GTDFTLTISSLQAED | |
| | GALTSGVHTFPAVLQSSGLYSLSSVVTVPS | | VAVYYCQQYYTTPL | |
| | SSLGTQTYICNVNHKPSNTKVDKKVDKTH | | TFGQGTKLEIKRTVA | |
| | TCPPCPPELLGGPSVFLFPPKPKDTLMISRT | | APSVFIFPPSDEQLKS | |
| | PEVTCVVVDVSHEDPEVKFNWYVDGVEV | | GTASVVCLLNNFYP | |
| | HNAKTKPREEQYNSTYRVVSVLTVLHQD | | REAKVQWKVDNAL | |
| | WLNGKEYKCKVSNKALPAPIEKTISKAKQ | | QSGNSQESVTEQDS | |
| | PREPQVYTLPPSREEMTKNQVSLTCLVKG | | KDSTYSLSSTLTLSK | |
| | FYPSDIAVEWESNGQPENNYKTTPPVLDS | | ADYEKHKVYACEVT | |
| | DGSFFLYSKLTVDKSRWQQGNVFSCSVM | | HQGLSSPVTKSFNRG | |
| | HEALHNHYTQKSLSLSPGK | | EC | |
| 15 | EVQLLESGGGLVQPGGSLRLSCAASGFTFS | 1641 | DIVMTQSPLSLPVTP | 1729 |
| | IYEIHWVRQAPGKGLEWVSAISGSGGSTY | | GEPASISCRSSQSLLH | |
| | YADSVKGRFTISRDNSKNTLYLQMNSLRA | | SNGYNYLDWYLQKP | |
| | EDTAVYYCARSYCGGDCWDYYYYYGMD | | GQSPQLLIYLASNRA | |
| | VWGQGTTVTVSSSTKGPSVFPLAPSSKSTS | | SGVPDRFSGSGSGTD | |
| | GGTAALGCLVKDYFPEPVTVSWNSGALTS | | FTLKISRVEAEDVGV | |
| | GVHTFPAVLQSSGLYSLSSVVTVPSSSLGT | | YYCKQTSHIPLTFGQ | |
| | QTYICNVNHKPSNTKVDKKVDKTHTCPPC | | GTKVEIKRTVAAPSV | |
| | PPELLGGPSVFLFPPKPKDTLMISRTPEVTC | | FIFPPSDEQLKSGTAS | |
| | VVVDVSHEDPEVKFNWYVDGVEVHNAKT | | VVCLLNNFYPREAK | |
| | KPREEQYNSTYRVVSVLTVLHQDWLNGK | | VQWKVDNALQSGN | |
| | EYKCKVSNKALPAPIEKTISKAKQPREPQV | | SQESVTEQDSKDSTY | |
| | YTLPPSREEMTKNQVSLTCLVKGFYPSDIA | | SLSSTLTLSKADYEK | |
| | VEWESNGQPENNYKTTPPVLDSDGSFFLY | | HKVYACEVTHQGLS | |
| | SKLTVDKSRWQQGNVFSCSVMHEALHNH | | SPVTKSFNRGEC | |
| | YTQKSLSLSPGK | | | |
| 16 | EVQLVESGGGLVKPGGSLRLSCAASGFTFS | 1642 | DIVMTQSPLSLPVTP | 1730 |
| | DNSMNWVRQAPGKGLEWVSYISSSGSTIY | | GEPASISCRSSQSLLH | |
| | YADSVKGRFTISRDDSKNTLYLQMNSLKT | | SNGYNYLDWYLQKP | |
| | EDTAVYYCARGRASSWPNWFDPWGQGTL | | GQSPQLLIYSASNLQ | |
| | VTVSSSTKGPSVFPLAPSSKSTSGGTAALG | | SGVPDRFSGSGSGTD | |
| | CLVKDYFPEPVTVSWNSGALTSGVHTFPA | | FTLKISRVEAEDVGV | |
| | VLQSSGLYSLSSVVTVPSSSLGTQTYICNV | | YYCMQALQTPPTFG | |
| | NHKPSNTKVDKKVDKTHTCPPCPPELLGG | | QGTKLEIKRTVAAPS | |
| | PSVFLFPPKPKDTLMISRTPEVTCVVVDVS | | VFIFPPSDEQLKSGT | |
| | HEDPEVKFNWYVDGVEVHNAKTKPREEQ | | ASVVCLLNNFYPRE | |
| | YNSTYRVVSVLTVLHQDWLNGKEYKCKV | | AKVQWKVDNALQS | |
| | SNKALPAPIEKTISKAKQPREPQVYTLPPSR | | GNSQESVTEQDSKD | |
| | EEMTKNQVSLTCLVKGFYPSDIAVEWESN | | STYSLSSTLTLSKAD | |
| | GQPENNYKTTPPVLDSDGSFFLYSKLTVD | | YEKHKVYACEVTHQ | |
| | KSRWQQGNVFSCSVMHEALHNHYTQKSL | | GLSSPVTKSFNRGEC | |
| | SLSPGK | | | |
| 17 | EVQLLESGGGLVQPGGSLRLSCAASGFTFS | 1643 | DIQMTQSPSSLSASV | 1731 |
| | SYAMSWVRQAPGKGLEWVSGISYDSDKI | | GDRVTITCRASQGIS | |
| | GYADAVKGRFTISRDNSKNTLYLQMNSLR | | NNLNWYQQKPGKA | |
| | AEDTAVYYCAREWEGFDYWGQGTLVTVS | | PKLLIYESSTLETGVP | |
| | SSTKGPSVFPLAPSSKSTSGGTAALGCLVK | | SRFSGSGSGTDFTLTI | |
| | DYFPEPVTVSWNSGALTSGVHTFPAVLQS | | SSLQPEDFATYYCQQ | |
| | SGLYSLSSVVTVPSSSLGTQTYICNVNHKP | | SYSAPLTFGGGTKVE | |
| | SNTKVDKKVDKTHTCPPCPPELLGGPSVFL | | IKRTVAAPSVFIFPPS | |
| | FPPKPKDTLMISRTPEVTCVVVDVSHEDPE | | DEQLKSGTASVVCL | |
| | VKFNWYVDGVEVHNAKTKPREEQYNSTY | | LNNFYPREAKVQWK | |
| | RVVSVLTVLHQDWLNGKEYKCKVSNKAL | | VDNALQSGNSQESV | |
| | PAPIEKTISKAKQPREPQVYTLPPSREEMTK | | TEQDSKDSTYSLSST | |
| | NQVSLTCLVKGFYPSDIAVEWESNGQPEN | | LTLSKADYEKHKVY | |
| | NYKTTPPVLDSDGSFFLYSKLTVDKSRWQ | | ACEVTHQGLSSPVT | |
| | QGNVFSCSVMHEALHNHYTQKSLSLSPGK | | KSFNRGEC | |
| 18 | QVQLVQSGAEVKKPGASVKVSCKASGYT | 1644 | DIVMTQSPLSLPVTP | 1732 |
| | FTDHYMHWVRQAPGQGLEWMGWINPNS | | GEPASISCRSSQSLLH | |
| | GGTNYAQKFQGRVTMTRDTSTSTVYMEL | | SNGYNYLDWYLQKP | |
| | SSLRSEDTAVYYCAKDKFGDEGSGWYGD | | GQSPQLLIYLGSNRA | |
| | FQHWGQGTLVTVSSSTKGPSVFPLAPSSKS | | SGVPDRFSGSGSGTD | |
| | TSGGTAALGCLVKDYFPEPVTVSWNSGAL | | FTLKISRVEAEDVGV | |
| | TSGVHTFPAVLQSSGLYSLSSVVTVPSSSL | | YYCMQTLRTPLTFG | |
| | GTQTYICNVNHKPSNTKVDKKVDKTHTCP | | GGTKVEIKRTVAAPS | |
| | PCPPELLGGPSVFLFPPKPKDTLMISRTPEV | | VFIFPPSDEQLKSGT | |
| | TCVVVDVSHEDPEVKFNWYVDGVEVHNA | | ASVVCLLNNFYPRE | |
| | KTKPREEQYNSTYRVVSVLTVLHQDWLN | | AKVQWKVDNALQS | |
| | GKEYKCKVSNKALPAPIEKTISKAKQPREP | | GNSQESVTEQDSKD | |
| | QVYTLPPSREEMTKNQVSLTCLVKGFYPS | | STYSLSSTLTLSKAD | |
| | DIAVEWESNGQPENNYKTTPPVLDSDGSF | | YEKHKVYACEVTHQ | |
| | FLYSKLTVDKSRWQQGNVFSCSVMHEAL | | GLSSPVTKSFNRGEC | |
| | HNHYTQKSLSLSPGK | | | |
| 19 | EVQLLESGGGLVQPGGSLRLSCAASGFTFS | 1645 | DIQMTQSPSSLSASV | 1733 |
| | SYWMHWVRQAPGKGLEWVSGFSGSART | | GDRVTITCRASQNIG | |
| | YYADSVKGRFTISRDNSKNTLYLQMNSLR | | PWLAWYQQKPGKA | |
| | AEDTAVYYCAREWSGFDYWGQGTLVTVS | | PKLLIYDAKDLHPGV | |
| | SSTKGPSVFPLAPSSKSTSGGTAALGCLVK | | PSRFSGSGSGTDFTL | |
| | DYFPEPVTVSWNSGALTSGVHTFPAVLQS | | TISSLQPEDFATYYC | |
| | SGLYSLSSVVTVPSSSLGTQTYICNVNHKP | | QQANTFPMTFGQGT | |
| | SNTKVDKKVDKTHTCPPCPPELLGGPSVFL | | RLEIKRTVAAPSVFIF | |
| | FPPKPKDTLMISRTPEVTCVVVDVSHEDPE | | PPSDEQLKSGTASVV | |
| | VKFNWYVDGVEVHNAKTKPREEQYNSTY | | CLLNNFYPREAKVQ | |
| | RVVSVLTVLHQDWLNGKEYKCKVSNKAL | | WKVDNALQSGNSQE | |
| | PAPIEKTISKAKQPREPQVYTLPPSREEMTK | | SVTEQDSKDSTYSLS | |
| | NQVSLTCLVKGFYPSDIAVEWESNGQPEN | | STLTLSKADYEKHK | |
| | NYKTTPPVLDSDGSFFLYSKLTVDKSRWQ | | VYACEVTHQGLSSP | |
| | QGNVFSCSVMHEALHNHYTQKSLSLSPGK | | VTKSFNRGEC | |
| 20 | QVQLVQSGAEVKKPGASVKVSCKASGYM | 1646 | DIQMTQSPSSLSASV | 1734 |
| | FTGYYIHWVRQAPGQGLEWMGWINPNSG | | GDRVTITCRASQSID | |
| | GTNYAQKFQGRVTMTRDTSTSTVYMELSS | | RWLAWYQQKPGKA | |
| | LRSEDTAVYYCAKDRFGSGNYGYMDVW | | PKLLIYGASSLQSGV | |
| | GKGTTVTVSSSTKGPSVFPLAPSSKSTSGG | | PSRFSGSGSGTDFTL | |
| | TAALGCLVKDYFPEPVTVSWNSGALTSGV | | TISSLQPEDFATYYC | |
| | HTFPAVLQSSGLYSLSSVVTVPSSSLGTQT | | QQSYSTPWTFGQGT | |
| | YICNVNHKPSNTKVDKKVDKTHTCPPCPP | | RLEIKRTVAAPSVFIF | |
| | ELLGGPSVFLFPPKPKDTLMISRTPEVTCV | | PPSDEQLKSGTASVV | |
| | VVDVSHEDPEVKFNWYVDGVEVHNAKTK | | CLLNNFYPREAKVQ | |
| | PREEQYNSTYRVVSVLTVLHQDWLNGKE | | WKVDNALQSGNSQE | |
| | YKCKVSNKALPAPIEKTISKAKQPREPQVY | | SVTEQDSKDSTYSLS | |
| | TLPPSREEMTKNQVSLTCLVKGFYPSDIAV | | STLTLSKADYEKHK | |
| | EWESNGQPENNYKTTPPVLDSDGSFFLYS | | VYACEVTHQGLSSP | |
| | KLTVDKSRWQQGNVFSCSVMHEALHNHY | | VTKSFNRGEC | |
| | TQKSLSLSPGK | | | |
| 21 | EVQLLESGGGLVQPGGSLRLSCAASGFTFS | 1647 | DIQMTQSPSSLSASV | 1735 |
| | SYAMSWVRQAPGKGLEWVSAISGSGGST | | GDRVTITCQASQDIS | |
| | YYADSVKGRFTISRDNSKNTLYLQMNSLR | | NNLNWYQQKPGKA | |
| | AEDTAVYYCARELSHDYGGNSDFDYWGQ | | PKLLIYAASGLQSGV | |
| | GTLVTVSSSTKGPSVFPLAPSSKSTSGGTA | | PSRFSGSGSGTDFTL | |
| | ALGCLVKDYFPEPVTVSWNSGALTSGVHT | | TISSLQPEDFATYYC | |
| | FPAVLQSSGLYSLSSVVTVPSSSLGTQTYIC | | QQANSFPLTFGGGT | |
| | NVNHKPSNTKVDKKVDKTHTCPPCPPELL | | KVEIKRTVAAPSVFI | |
| | GGPSVFLFPPKPKDTLMISRTPEVTCVVVD | | FPPSDEQLKSGTASV | |
| | VSHEDPEVKFNWYVDGVEVHNAKTKPRE | | VCLLNNFYPREAKV | |
| | EQYNSTYRVVSVLTVLHQDWLNGKEYKC | | QWKVDNALQSGNS | |
| | KVSNKALPAPIEKTISKAKQPREPQVYTLP | | QESVTEQDSKDSTYS | |
| | PSREEMTKNQVSLTCLVKGFYPSDIAVEW | | LSSTLTLSKADYEKH | |
| | ESNGQPENNYKTTPPVLDSDGSFFLYSKLT | | KVYACEVTHQGLSS | |
| | VDKSRWQQGNVFSCSVMHEALHNHYTQ | | PVTKSFNRGEC | |
| | KSLSLSPGK | | | |
| 22 | QVQLVQSGAEVKKPGASVKVSCKASGYT | 1648 | DIQMTQSPSSLSASV | 1736 |
| | FTDYYIHWVRQAPGQGLEWMGWINPNSG | | GDRVTITCRASRSIR | |
| | GTNYAQEFQGRVTMTRDTSTSTVYMELSS | | TWLAWYQQKPGKA | |
| | LRSEDTAVYYCARDHRIAVAGSYFDYWG | | PKLLIYAASSLQTGV | |
| | QGTLVTVSSSTKGPSVFPLAPSSKSTSGGT | | PSRFSGSGSGTDFTL | |
| | AALGCLVKDYFPEPVTVSWNSGALTSGVH | | TISSLQPEDFATYYC | |
| | TFPAVLQSSGLYSLSSVVTVPSSSLGTQTYI | | QQSYSTPYTFGQGT | |
| | CNVNHKPSNTKVDKKVDKTHTCPPCPPEL | | KLEIKRTVAAPSVFIF | |
| | LGGPSVFLFPPKPKDTLMISRTPEVTCVVV | | PPSDEQLKSGTASVV | |
| | DVSHEDPEVKFNWYVDGVEVHNAKTKPR | | CLLNNFYPREAKVQ | |
| | EEQYNSTYRVVSVLTVLHQDWLNGKEYK | | WKVDNALQSGNSQE | |
| | CKVSNKALPAPIEKTISKAKQPREPQVYTL | | SVTEQDSKDSTYSLS | |
| | PPSREEMTKNQVSLTCLVKGFYPSDIAVE | | STLTLSKADYEKHK | |
| | WESNGQPENNYKTTPPVLDSDGSFFLYSK | | VYACEVTHQGLSSP | |
| | LTVDKSRWQQGNVFSCSVMHEALHNHYT | | VTKSFNRGEC | |
| | QKSLSLSPGK | | | |
| 23 | QVQLVQSGAEVKKPGASVKVSCKASGYP | 1649 | DIQMTQSPSSLSASV | 1737 |
| | FTAHYIHWVRQAPGQGLEWMGWINPNSG | | GDRVTITCRASQGIN | |
| | GTNYAQKFQGRVTMTRDTSTSTVYMELSS | | NWLAWYQQKPGKA | |
| | LRSEDTAVYYCARDVEMATIGAYWYFDL | | PKLLIYDASNLETGV | |
| | WGRGTLVTVSSSTKGPSVFPLAPSSKSTSG | | PSRFSGSGSGTDFTL | |
| | GTAALGCLVKDYFPEPVTVSWNSGALTSG | | TISSLQPEDFATYYC | |
| | VHTFPAVLQSSGLYSLSSVVTVPSSSLGTQ | | QQANSFPPTFGQGTK | |
| | TYICNVNHKPSNTKVDKKVDKTHTCPPCP | | LEIKRTVAAPSVFIFP | |
| | PELLGGPSVFLFPPKPKDTLMISRTPEVTCV | | PSDEQLKSGTASVVC | |
| | VVDVSHEDPEVKFNWYVDGVEVHNAKTK | | LLNNFYPREAKVQW | |
| | PREEQYNSTYRVVSVLTVLHQDWLNGKE | | KVDNALQSGNSQES | |
| | YKCKVSNKALPAPIEKTISKAKQPREPQVY | | VTEQDSKDSTYSLSS | |
| | TLPPSREEMTKNQVSLTCLVKGFYPSDIAV | | TLTLSKADYEKHKV | |
| | EWESNGQPENNYKTTPPVLDSDGSFFLYS | | YACEVTHQGLSSPV | |
| | KLTVDKSRWQQGNVFSCSVMHEALHNHY | | TKSFNRGEC | |
| | TQKSLSLSPGK | | | |
| 24 | QVQLVQSGAEVKKPGSSVKVSCKASGYSF | 1650 | DIVMTQSPLSLPVTP | 1738 |
| | TSYGISWVRQAPGQGLEWLGWISAYNGN | | GEPASISCRSSQSLLH | |
| | TNYGQSLQGRVTITADESTSTAYMELSSLR | | SNGYNYLDWYLQKP | |
| | SEDTAVYYCARARGAGTFFDYWGQGTLV | | GQSPQLLIYDATNLP | |
| | TVSSSTKGPSVFPLAPSSKSTSGGTAALGC | | TGVPDRFSGSGSGTD | |
| | LVKDYFPEPVTVSWNSGALTSGVHTFPAV | | FTLKISRVEAEDVGV | |
| | LQSSGLYSLSSVVTVPSSSLGTQTYICNVN | | YYCMQALQTPFTFG | |
| | HKPSNTKVDKKVDKTHTCPPCPPELLGGP | | QGTKLEIKRTVAAPS | |
| | SVFLFPPKPKDTLMISRTPEVTCVVVDVSH | | VFIFPPSDEQLKSGT | |
| | EDPEVKFNWYVDGVEVHNAKTKPREEQY | | ASVVCLLNNFYPRE | |
| | NSTYRVVSVLTVLHQDWLNGKEYKCKVS | | AKVQWKVDNALQS | |
| | NKALPAPIEKTISKAKQPREPQVYTLPPSRE | | GNSQESVTEQDSKD | |
| | EMTKNQVSLTCLVKGFYPSDIAVEWESNG | | STYSLSSTLTLSKAD | |
| | QPENNYKTTPPVLDSDGSFFLYSKLTVDKS | | YEKHKVYACEVTHQ | |
| | RWQQGNVFSCSVMHEALHNHYTQKSLSL | | GLSSPVTKSFNRGEC | |
| | SPGK | | | |
| 25 | QVQLVQSGAEVKKPGASVKVSCKASGYT | 1651 | DIQMTQSPSSLSASV | 1739 |
| | FTGYYMHWVRQAPGQGLEWMGRINPNG | | GDRVTITCRASQSIN | |
| | GSTTYAQKFQGRVTMTRDTSTSTVYMELS | | DWLAWYQQKPGKA | |
| | SLRSEDTAVYYCARDDFYYYYLDFWGKG | | PKLLIYAASNLQSGV | |
| | TTVTVSSSTKGPSVFPLAPSSKSTSGGTAA | | PSRFSGSGSGTDFTL | |
| | LGCLVKDYFPEPVTVSWNSGALTSGVHTF | | TISSLQPEDFATYYC | |
| | PAVLQSSGLYSLSSVVTVPSSSLGTQTYIC | | QQGYSTPPTFGQGT | |
| | NVNHKPSNTKVDKKVDKTHTCPPCPPELL | | KVEIKRTVAAPSVFI | |
| | GGPSVFLFPPKPKDTLMISRTPEVTCVVVD | | FPPSDEQLKSGTASV | |
| | VSHEDPEVKFNWYVDGVEVHNAKTKPRE | | VCLLNNFYPREAKV | |
| | EQYNSTYRVVSVLTVLHQDWLNGKEYKC | | QWKVDNALQSGNS | |
| | KVSNKALPAPIEKTISKAKQPREPQVYTLP | | QESVTEQDSKDSTYS | |
| | PSREEMTKNQVSLTCLVKGFYPSDIAVEW | | LSSTLTLSKADYEKH | |
| | ESNGQPENNYKTTPPVLDSDGSFFLYSKLT | | KVYACEVTHQGLSS | |
| | VDKSRWQQGNVFSCSVMHEALHNHYTQ | | PVTKSFNRGEC | |
| | KSLSLSPGK | | | |
| 26 | QVQLVQSGAEVKKPGASVKVSCKASGYT | 1652 | DIQMTQSPSSLSASV | 1740 |
| | FTENEMHWVRQAPGQGLEWMGWMNPNS | | GDRVTITCQASQDIR | |
| | GNTGYAQKFQGRVTMTRDTSTSTVYMEL | | NYLNWYQQKPGKA | |
| | SSLRSEDTAVYYCAREGGDWPYYYMDV | | PKLLIYAASSLQSGV | |
| | WGKGTTVTVSSSTKGPSVFPLAPSSKSTSG | | PSRFSGSGSGTDFTL | |
| | GTAALGCLVKDYFPEPVTVSWNSGALTSG | | TISSLQPEDFATYYC | |
| | VHTFPAVLQSSGLYSLSSVVTVPSSSLGTQ | | QQTSSTPLTFGPGTK | |
| | TYICNVNHKPSNTKVDKKVDKTHTCPPCP | | VDIKRTVAAPSVFIFP | |
| | PELLGGPSVFLFPPKPKDTLMISRTPEVTCV | | PSDEQLKSGTASVVC | |
| | VVDVSHEDPEVKFNWYVDGVEVHNAKTK | | LLNNFYPREAKVQW | |
| | PREEQYNSTYRVVSVLTVLHQDWLNGKE | | KVDNALQSGNSQES | |
| | YKCKVSNKALPAPIEKTISKAKQPREPQVY | | VTEQDSKDSTYSLSS | |
| | TLPPSREEMTKNQVSLTCLVKGFYPSDIAV | | TLTLSKADYEKHKV | |
| | EWESNGQPENNYKTTPPVLDSDGSFFLYS | | YACEVTHQGLSSPV | |
| | KLTVDKSRWQQGNVFSCSVMHEALHNHY | | TKSFNRGEC | |
| | TQKSLSLSPGK | | | |
| 27 | QVQLVQSGAEVKKPGASVKVSCKASGYT | 1653 | DIQMTQSPSSLSASV | 1741 |
| | LTGYYMHWVRQAPGQGLEWMGWMNPSS | | GDRVTITCRASQDIR | |
| | GNTGYAQQFQGRVTMTRDTSTSTVYMEL | | NNLGWYQQKPGKA | |
| | SSLRSEDTAVYYCARASSDRYYYDGVWY | | PKLLIYGASSLQSGV | |
| | FDLWGRGTLVTVSSSTKGPSVFPLAPSSKS | | PSRFSGSGSGTDFTL | |
| | TSGGTAALGCLVKDYFPEPVTVSWNSGAL | | TISSLQPEDFATYYC | |
| | TSGVHTFPAVLQSSGLYSLSSVVTVPSSSL | | QQTYSSPPTFGQGTK | |
| | GTQTYICNVNHKPSNTKVDKKVDKTHTCP | | LEIKRTVAAPSVFIFP | |
| | PCPPELLGGPSVFLFPPKPKDTLMISRTPEV | | PSDEQLKSGTASVVC | |
| | TCVVVDVSHEDPEVKFNWYVDGVEVHNA | | LLNNFYPREAKVQW | |
| | KTKPREEQYNSTYRVVSVLTVLHQDWLN | | KVDNALQSGNSQES | |
| | GKEYKCKVSNKALPAPIEKTISKAKQPREP | | VTEQDSKDSTYSLSS | |
| | QVYTLPPSREEMTKNQVSLTCLVKGFYPS | | TLTLSKADYEKHKV | |
| | DIAVEWESNGQPENNYKTTPPVLDSDGSF | | YACEVTHQGLSSPV | |
| | FLYSKLTVDKSRWQQGNVFSCSVMHEAL | | TKSFNRGEC | |
| | HNHYTQKSLSLSPGK | | | |
| 28 | EVQLLESGGGLVQPGGSLRLSCAASGFTFS | 1654 | DIQMTQSPSSLSASV | 1742 |
| | TYAMHWVRQAPGKGLEWVSAISGSGGST | | GDRVTITCRASQGID | |
| | YYADSVKGRFTISRDNSKNTLYLQMNSLR | | NYLAWYQQKPGKA | |
| | AEDTAVYYCARDGYGDYPFDYWGQGTL | | PKLLIYQASTLESGV | |
| | VTVSSSTKGPSVFPLAPSSKSTSGGTAALG | | PSRFSGSGSGTDFTL | |
| | CLVKDYFPEPVTVSWNSGALTSGVHTFPA | | TISSLQPEDFATYYC | |
| | VLQSSGLYSLSSVVTVPSSSLGTQTYICNV | | QQSYSIPWTFGQGTK | |
| | NHKPSNTKVDKKVDKTHTCPPCPPELLGG | | VEIKRTVAAPSVFIFP | |
| | PSVFLFPPKPKDTLMISRTPEVTCVVVDVS | | PSDEQLKSGTASVVC | |
| | HEDPEVKFNWYVDGVEVHNAKTKPREEQ | | LLNNFYPREAKVQW | |
| | YNSTYRVVSVLTVLHQDWLNGKEYKCKV | | KVDNALQSGNSQES | |
| | SNKALPAPIEKTISKAKQPREPQVYTLPPSR | | VTEQDSKDSTYSLSS | |
| | EEMTKNQVSLTCLVKGFYPSDIAVEWESN | | TLTLSKADYEKHKV | |
| | GQPENNYKTTPPVLDSDGSFFLYSKLTVD | | YACEVTHQGLSSPV | |
| | KSRWQQGNVFSCSVMHEALHNHYTQKSL | | TKSFNRGEC | |
| | SLSPGK | | | |
| 29 | QVQLVQSGAEVKKPGASVKVSCKASGYT | 1655 | DIQMTQSPSSLSASV | 1743 |
| | FTGYYLHWVRQAPGQGLEWMGVINVRRG | | GDRVTITCRASQSIS | |
| | STRYAQNFQGRVTMTRDTSTSTVYMELSS | | RWLAWYQQKPGKA | |
| | LRSEDTAVYYCARVSGSYYQPWGQGTLV | | PKLLIYDASNLETGV | |
| | TVSSSTKGPSVFPLAPSSKSTSGGTAALGC | | PSRFSGSGSGTDFTL | |
| | LVKDYFPEPVTVSWNSGALTSGVHTFPAV | | TISSLQPEDFATYYC | |
| | LQSSGLYSLSSVVTVPSSSLGTQTYICNVN | | QQGNSFPPIFGGGTK | |
| | HKPSNTKVDKKVDKTHTCPPCPPELLGGP | | VEIKRTVAAPSVFIFP | |
| | SVFLFPPKPKDTLMISRTPEVTCVVVDVSH | | PSDEQLKSGTASVVC | |
| | EDPEVKFNWYVDGVEVHNAKTKPREEQY | | LLNNFYPREAKVQW | |
| | NSTYRVVSVLTVLHQDWLNGKEYKCKVS | | KVDNALQSGNSQES | |
| | NKALPAPIEKTISKAKQPREPQVYTLPPSRE | | VTEQDSKDSTYSLSS | |
| | EMTKNQVSLTCLVKGFYPSDIAVEWESNG | | TLTLSKADYEKHKV | |
| | QPENNYKTTPPVLDSDGSFFLYSKLTVDKS | | YACEVTHQGLSSPV | |
| | RWQQGNVFSCSVMHEALHNHYTQKSLSL | | TKSFNRGEC | |
| | SPGK | | | |
| 30 | QVQLVQSGAEVKKPGASVKVSCKASGYT | 1656 | DIQMTQSPSSLSASV | 1744 |
| | FSNYYMHWVRQAPGQGLEWMGWMNPD | | GDRVTITCRASQSISS | |
| | SGTTGYAQKFQGRVTMTRDTSTSTVYME | | WLAWYQQKPGKAP | |
| | LSSLRSEDTAVYYCVRDGTMVQGIFDYW | | KLLIYGASSLQSGVP | |
| | GQGTLVTVSSSTKGPSVFPLAPSSKSTSGG | | SRFSGSGSGTDFTLTI | |
| | TAALGCLVKDYFPEPVTVSWNSGALTSGV | | SSLQPEDFATYYCQQ | |
| | HTFPAVLQSSGLYSLSSVVTVPSSSLGTQT | | TYRTPLTFGPGTKVD | |
| | YICNVNHKPSNTKVDKKVDKTHTCPPCPP | | IKRTVAAPSVFIFPPS | |
| | ELLGGPSVFLFPPKPKDTLMISRTPEVTCV | | DEQLKSGTASVVCL | |
| | VVDVSHEDPEVKFNWYVDGVEVHNAKTK | | LNNFYPREAKVQWK | |
| | PREEQYNSTYRVVSVLTVLHQDWLNGKE | | VDNALQSGNSQESV | |
| | YKCKVSNKALPAPIEKTISKAKQPREPQVY | | TEQDSKDSTYSLSST | |
| | TLPPSREEMTKNQVSLTCLVKGFYPSDIAV | | LTLSKADYEKHKVY | |
| | EWESNGQPENNYKTTPPVLDSDGSFFLYS | | ACEVTHQGLSSPVT | |
| | KLTVDKSRWQQGNVFSCSVMHEALHNHY | | KSFNRGEC | |
| | TQKSLSLSPGK | | | |
| 31 | QVQLVQSGAEVKKPGSSVKVSCKASGGTF | 1657 | DIQMTQSPSSLSASV | 1745 |
| | STYAITWVRQAPGQGLEWMGGIIPIVGRA | | GDRVTITCRASQGIG | |
| | NYAQKFQGRVTITADESTSTAYMELSSLRS | | NDLGWYQQKPGKA | |
| | EDTAVYYCARSGGHDLDYWGQGTLVTVS | | PKLLIYGASSVQSGV | |
| | SSTKGPSVFPLAPSSKSTSGGTAALGCLVK | | PSRFSGSGSGTDFTL | |
| | DYFPEPVTVSWNSGALTSGVHTFPAVLQS | | TISSLQPEDFATYYC | |
| | SGLYSLSSVVTVPSSSLGTQTYICNVNHKP | | QQSYSTPITFGQGTR | |
| | SNTKVDKKVDKTHTCPPCPPELLGGPSVFL | | LEIKRTVAAPSVFIFP | |
| | FPPKPKDTLMISRTPEVTCVVVDVSHEDPE | | PSDEQLKSGTASVVC | |
| | VKFNWYVDGVEVHNAKTKPREEQYNSTY | | LLNNFYPREAKVQW | |
| | RVVSVLTVLHQDWLNGKEYKCKVSNKAL | | KVDNALQSGNSQES | |
| | PAPIEKTISKAKQPREPQVYTLPPSREEMTK | | VTEQDSKDSTYSLSS | |
| | NQVSLTCLVKGFYPSDIAVEWESNGQPEN | | TLTLSKADYEKHKV | |
| | NYKTTPPVLDSDGSFFLYSKLTVDKSRWQ | | YACEVTHQGLSSPV | |
| | QGNVFSCSVMHEALHNHYTQKSLSLSPGK | | TKSFNRGEC | |
| 32 | EVQLLESGGGLVQPGGSLRLSCAASGFTFS | 1658 | EIVMTQSPATLSVSP | 1746 |
| | SYGMHWVRQAPGKGLEWVSSISGSGDTT | | GERATLSCRASQSVS | |
| | YYADSVKGRFTISRDNSKNTLYLQMNSLR | | SSYLAWYQQKPGQA | |
| | AEDTAVYYCARDNPYGDYGGSFDYWGQ | | PRLLIYATSTRATGIP | |
| | GTLVTVSSSTKGPSVFPLAPSSKSTSGGTA | | ARFSGSGSGTEFTLTI | |
| | ALGCLVKDYFPEPVTVSWNSGALTSGVHT | | SSLQSEDFAVYYCQ | |
| | FPAVLQSSGLYSLSSVVTVPSSSLGTQTYIC | | QYGSLPLTFGQGTK | |
| | NVNHKPSNTKVDKKVDKTHTCPPCPPELL | | VEIKRTVAAPSVFIFP | |
| | GGPSVFLFPPKPKDTLMISRTPEVTCVVVD | | PSDEQLKSGTASVVC | |
| | VSHEDPEVKFNWYVDGVEVHNAKTKPRE | | LLNNFYPREAKVQW | |
| | EQYNSTYRVVSVLTVLHQDWLNGKEYKC | | KVDNALQSGNSQES | |
| | KVSNKALPAPIEKTISKAKQPREPQVYTLP | | VTEQDSKDSTYSLSS | |
| | PSREEMTKNQVSLTCLVKGFYPSDIAVEW | | TLTLSKADYEKHKV | |
| | ESNGQPENNYKTTPPVLDSDGSFFLYSKLT | | YACEVTHQGLSSPV | |
| | VDKSRWQQGNVFSCSVMHEALHNHYTQ | | TKSFNRGEC | |
| | KSLSLSPGK | | | |
| 33 | QVQLVQSGAEVKKPGASVKVSCKASGYT | 1659 | DIQMTQSPSSLSASV | 1747 |
| | FTSYYMHWVRQAPGQGLEWMGIIDPSGG | | GDRVTITCRASQGIS | |
| | STNYAQKFQGRVTMTRDTSTSTVYMELSS | | NNLNWYQQKPGKA | |
| | LRSEDTAVYYCARDYYGSGSYYGLDYWG | | PKLLIYDASNLETGV | |
| | RGTLVTVSSSTKGPSVFPLAPSSKSTSGGT | | PSRFSGSGSGTDFTL | |
| | AALGCLVKDYFPEPVTVSWNSGALTSGVH | | TISSLQPEDFATYYC | |
| | TFPAVLQSSGLYSLSSVVTVPSSSLGTQTYI | | QQANSFPLTFGPGTK | |
| | CNVNHKPSNTKVDKKVDKTHTCPPCPPEL | | VDIKRTVAAPSVFIFP | |
| | LGGPSVFLFPPKPKDTLMISRTPEVTCVVV | | PSDEQLKSGTASVVC | |
| | DVSHEDPEVKFNWYVDGVEVHNAKTKPR | | LLNNFYPREAKVQW | |
| | EEQYNSTYRVVSVLTVLHQDWLNGKEYK | | KVDNALQSGNSQES | |
| | CKVSNKALPAPIEKTISKAKQPREPQVYTL | | VTEQDSKDSTYSLSS | |
| | PPSREEMTKNQVSLTCLVKGFYPSDIAVE | | TLTLSKADYEKHKV | |
| | WESNGQPENNYKTTPPVLDSDGSFFLYSK | | YACEVTHQGLSSPV | |
| | LTVDKSRWQQGNVFSCSVMHEALHNHYT | | TKSFNRGEC | |
| | QKSLSLSPGK | | | |
| 34 | QVQLVQSGAEVKKPGASVKVSCKASGYT | 1660 | DIQMTQSPSSLSASV | 1748 |
| | FTDYYMHWVRQAPGQGLEWMGIINPSGG | | GDRVTITCRASQGIR | |
| | STRYAQKFQGRVTMTRDTSTSTVYMELSS | | NDLAWYQQKPGKA | |
| | LRSEDTAVYYCARVDGRRWLQSDYWGQ | | PKLLIYAASTLQNGV | |
| | GTLVTVSSSTKGPSVFPLAPSSKSTSGGTA | | PSRFSGSGSGTDFTL | |
| | ALGCLVKDYFPEPVTVSWNSGALTSGVHT | | TISSLQPEDFATYYC | |
| | FPAVLQSSGLYSLSSVVTVPSSSLGTQTYIC | | QQSYSTPWTFGQGT | |
| | NVNHKPSNTKVDKKVDKTHTCPPCPPELL | | KVEIKRTVAAPSVFI | |
| | GGPSVFLFPPKPKDTLMISRTPEVTCVVVD | | FPPSDEQLKSGTASV | |
| | VSHEDPEVKFNWYVDGVEVHNAKTKPRE | | VCLLNNFYPREAKV | |
| | EQYNSTYRVVSVLTVLHQDWLNGKEYKC | | QWKVDNALQSGNS | |
| | KVSNKALPAPIEKTISKAKQPREPQVYTLP | | QESVTEQDSKDSTYS | |
| | PSREEMTKNQVSLTCLVKGFYPSDIAVEW | | LSSTLTLSKADYEKH | |
| | ESNGQPENNYKTTPPVLDSDGSFFLYSKLT | | KVYACEVTHQGLSS | |
| | VDKSRWQQGNVFSCSVMHEALHNHYTQ | | PVTKSFNRGEC | |
| | KSLSLSPGK | | | |
| 35 | QVQLVQSGAEVKKPGASVKVSCKASGYT | 1661 | DIQMTQSPSSLSASV | 1749 |
| | FTDYYMHWVRQAPGQGLEWMGIINPSGG | | GDRVTITCRASQGIR | |
| | STRYAQKFQGRVTMTRDTSTSTVYMELSS | | NDLAWYQQKPGKA | |
| | LRSEDTAVYYCARVDGRRWLRSDYWGQ | | PKLLIYAASTLQNGV | |
| | GTLVTVSSSTKGPSVFPLAPSSKSTSGGTA | | PSRFSGSGSGTDFTL | |
| | ALGCLVKDYFPEPVTVSWNSGALTSGVHT | | TISSLQPEDFATYYC | |
| | FPAVLQSSGLYSLSSVVTVPSSSLGTQTYIC | | QQSYSTPWTFGQGT | |
| | NVNHKPSNTKVDKKVDKTHTCPPCPPELL | | KVEIKRTVAAPSVFI | |
| | GGPSVFLFPPKPKDTLMISRTPEVTCVVVD | | FPPSDEQLKSGTASV | |
| | VSHEDPEVKFNWYVDGVEVHNAKTKPRE | | VCLLNNFYPREAKV | |
| | EQYNSTYRVVSVLTVLHQDWLNGKEYKC | | QWKVDNALQSGNS | |
| | KVSNKALPAPIEKTISKAKQPREPQVYTLP | | QESVTEQDSKDSTYS | |
| | PSREEMTKNQVSLTCLVKGFYPSDIAVEW | | LSSTLTLSKADYEKH | |
| | ESNGQPENNYKTTPPVLDSDGSFFLYSKLT | | KVYACEVTHQGLSS | |
| | VDKSRWQQGNVFSCSVMHEALHNHYTQ | | PVTKSFNRGEC | |
| | KSLSLSPGK | | | |
| 36 | QVQLVQSGAEVKKPGASVKVSCKASGGT | 1662 | DIQMTQSPSSLSASV | 1750 |
| | FSSYAISWVRQAPGQGLEWLGIISPSGRSA | | GDRVTITCQASQGIN | |
| | GYGRKFQGRVTMTRDTSTSTVYMELSSLR | | NYLNWYQQKPGKA | |
| | SEDTAVYYCARTDYGGHKWYFDLWGRG | | PKLLIYAASTLQRGV | |
| | TLVTVSSSTKGPSVFPLAPSSKSTSGGTAA | | PSRFSGSGSGTDFTL | |
| | LGCLVKDYFPEPVTVSWNSGALTSGVHTF | | TISSLQPEDFATYYC | |
| | PAVLQSSGLYSLSSVVTVPSSSLGTQTYIC | | QQSYQTPLTFGGGT | |
| | NVNHKPSNTKVDKKVDKTHTCPPCPPELL | | KVEIKRTVAAPSVFI | |
| | GGPSVFLFPPKPKDTLMISRTPEVTCVVVD | | FPPSDEQLKSGTASV | |
| | VSHEDPEVKFNWYVDGVEVHNAKTKPRE | | VCLLNNFYPREAKV | |
| | EQYNSTYRVVSVLTVLHQDWLNGKEYKC | | QWKVDNALQSGNS | |
| | KVSNKALPAPIEKTISKAKQPREPQVYTLP | | QESVTEQDSKDSTYS | |
| | PSREEMTKNQVSLTCLVKGFYPSDIAVEW | | LSSTLTLSKADYEKH | |
| | ESNGQPENNYKTTPPVLDSDGSFFLYSKLT | | KVYACEVTHQGLSS | |
| | VDKSRWQQGNVFSCSVMHEALHNHYTQ | | PVTKSFNRGEC | |
| | KSLSLSPGK | | | |
| 37 | QVQLVQSGAEVKKPGASVKVSCKASGYT | 1663 | DIQMTQSPSSLSASV | 1751 |
| | FTGYYLHWVRQAPGQGLEWMGVISPSGG | | GDRVTITCRASQSISS | |
| | GTSYAQKFQGRVTMTRDTSTSTVYMELSS | | YLNWYQQKPGKAP | |
| | LRSEDTAVYYCARAGFGEGVFRHWGQGT | | KLLIYAASSLQSGVP | |
| | LVTVSSSTKGPSVFPLAPSSKSTSGGTAAL | | SRFSGSGSGTDFTLTI | |
| | GCLVKDYFPEPVTVSWNSGALTSGVHTFP | | SSLQPEDFATYYCQQ | |
| | AVLQSSGLYSLSSVVTVPSSSLGTQTYICN | | SYSTPLTFGGGTKVE | |
| | VNHKPSNTKVDKKVDKTHTCPPCPPELLG | | IKRTVAAPSVFIFPPS | |
| | GPSVFLFPPKPKDTLMISRTPEVTCVVVDV | | DEQLKSGTASVVCL | |
| | SHEDPEVKFNWYVDGVEVHNAKTKPREE | | LNNFYPREAKVQWK | |
| | QYNSTYRVVSVLTVLHQDWLNGKEYKCK | | VDNALQSGNSQESV | |
| | VSNKALPAPIEKTISKAKQPREPQVYTLPPS | | TEQDSKDSTYSLSST | |
| | REEMTKNQVSLTCLVKGFYPSDIAVEWES | | LTLSKADYEKHKVY | |
| | NGQPENNYKTTPPVLDSDGSFFLYSKLTV | | ACEVTHQGLSSPVT | |
| | DKSRWQQGNVFSCSVMHEALHNHYTQKS | | KSFNRGEC | |
| | LSLSPGK | | | |
| 38 | QVQLVQSGAEVKKPGASVKVSCKASGYS | 1664 | DIQMTQSPSSLSASV | 1752 |
| | FTSHAISWVRQAPGQGLEWMGWIKPNSG | | GDRVTITCRASQGIS | |
| | DTKYAQKFQGRVTMTRDTSTSTVYMELSS | | NYLAWYQQKPGKA | |
| | LRSEDTAVYYCARGSDDYYGSYYFDYWG | | PKLLIYTASTLQSGV | |
| | QGTLVTVSSSTKGPSVFPLAPSSKSTSGGT | | PSRFSGSGSGTDFTL | |
| | AALGCLVKDYFPEPVTVSWNSGALTSGVH | | TISSLQPEDFATYYC | |
| | TFPAVLQSSGLYSLSSVVTVPSSSLGTQTYI | | QQSYSTPLTFGGGTK | |
| | CNVNHKPSNTKVDKKVDKTHTCPPCPPEL | | VEIKRTVAAPSVFIFP | |
| | LGGPSVFLFPPKPKDTLMISRTPEVTCVVV | | PSDEQLKSGTASVVC | |
| | DVSHEDPEVKFNWYVDGVEVHNAKTKPR | | LLNNFYPREAKVQW | |
| | EEQYNSTYRVVSVLTVLHQDWLNGKEYK | | KVDNALQSGNSQES | |
| | CKVSNKALPAPIEKTISKAKQPREPQVYTL | | VTEQDSKDSTYSLSS | |
| | PPSREEMTKNQVSLTCLVKGFYPSDIAVE | | TLTLSKADYEKHKV | |
| | WESNGQPENNYKTTPPVLDSDGSFFLYSK | | YACEVTHQGLSSPV | |
| | LTVDKSRWQQGNVFSCSVMHEALHNHYT | | TKSFNRGEC | |
| | QKSLSLSPGK | | | |
| 39 | EVQLLESGGGLVQPGGSLRLSCAASGFTFR | 1665 | DIQMTQSPSSLSASV | 1753 |
| | NYGMGWVRQAPGKGLEWVSAISGSGGST | | GDRVTITCRASQGIS | |
| | YYADSVKGRFTISRDNSKNTLYLQMNSLR | | NDLAWYQQKPGKA | |
| | AEDTAVYYCARVKFYGMDVWGQGTTVT | | PKLLIYGASNLETGV | |
| | VSSSTKGPSVFPLAPSSKSTSGGTAALGCL | | PSRFSGSGSGTDFTL | |
| | VKDYFPEPVTVSWNSGALTSGVHTFPAVL | | TISSLQPEDFATYYC | |
| | QSSGLYSLSSVVTVPSSSLGTQTYICNVNH | | QQANSFPFTFGPGTK | |
| | KPSNTKVDKKVDKTHTCPPCPPELLGGPS | | VDIKRTVAAPSVFIFP | |
| | VFLFPPKPKDTLMISRTPEVTCVVVDVSHE | | PSDEQLKSGTASVVC | |
| | DPEVKFNWYVDGVEVHNAKTKPREEQYN | | LLNNFYPREAKVQW | |
| | STYRVVSVLTVLHQDWLNGKEYKCKVSN | | KVDNALQSGNSQES | |
| | KALPAPIEKTISKAKQPREPQVYTLPPSREE | | VTEQDSKDSTYSLSS | |
| | MTKNQVSLTCLVKGFYPSDIAVEWESNGQ | | TLTLSKADYEKHKV | |
| | PENNYKTTPPVLDSDGSFFLYSKLTVDKSR | | YACEVTHQGLSSPV | |
| | WQQGNVFSCSVMHEALHNHYTQKSLSLS | | TKSFNRGEC | |
| | PGK | | | |
| 40 | QVQLVQSGAEVKKPGASVKVSCKASGYT | 1666 | DIQMTQSPSSLSASV | 1754 |
| | FTDYHMHWVRQAPGQGLEWMGWMSPNS | | GDRVTITCRVSQGIS | |
| | GNTGYAQNFQGRVTMTRDTSTSTVYMEL | | SYLNWYQQKPGKAP | |
| | SSLRSEDTAVYYCARADYYGSDYVKFDY | | KLLIYEASTLESGVP | |
| | WGQGTLVTVSSSTKGPSVFPLAPSSKSTSG | | SRFSGSGSGTDFTLTI | |
| | GTAALGCLVKDYFPEPVTVSWNSGALTSG | | SSLQPEDFATYYCQQ | |
| | VHTFPAVLQSSGLYSLSSVVTVPSSSLGTQ | | GYSTPPTFGQGTKVE | |
| | TYICNVNHKPSNTKVDKKVDKTHTCPPCP | | IKRTVAAPSVFIFPPS | |
| | PELLGGPSVFLFPPKPKDTLMISRTPEVTCV | | DEQLKSGTASVVCL | |
| | VVDVSHEDPEVKFNWYVDGVEVHNAKTK | | LNNFYPREAKVQWK | |
| | PREEQYNSTYRVVSVLTVLHQDWLNGKE | | VDNALQSGNSQESV | |
| | YKCKVSNKALPAPIEKTISKAKQPREPQVY | | TEQDSKDSTYSLSST | |
| | TLPPSREEMTKNQVSLTCLVKGFYPSDIAV | | LTLSKADYEKHKVY | |
| | EWESNGQPENNYKTTPPVLDSDGSFFLYS | | ACEVTHQGLSSPVT | |
| | KLTVDKSRWQQGNVFSCSVMHEALHNHY | | KSFNRGEC | |
| | TQKSLSLSPGK | | | |
| 41 | QVQLVQSGAEVKKPGASVKVSCKASGYT | 1667 | DIVMTQSPLSLPVTP | 1755 |
| | FPNYGISWVRQAPGQGLEWMGWINPNSG | | GEPASISCRSSQSLLQ | |
| | GTKYAQRFQGRVTMTRDTSTSTVYMELSS | | SNGYNYLDWYLQKP | |
| | LRSEDTAVYYCARDRDILTGYYHFDYWG | | GQSPQLLIYLGSNRA | |
| | QGTLVTVSSSTKGPSVFPLAPSSKSTSGGT | | SGVPDRFSGSGSGTD | |
| | AALGCLVKDYFPEPVTVSWNSGALTSGVH | | FTLKISRVEAEDVGV | |
| | TFPAVLQSSGLYSLSSVVTVPSSSLGTQTYI | | YYCMQSTHWPLTFG | |
| | CNVNHKPSNTKVDKKVDKTHTCPPCPPEL | | QGTRLEIKRTVAAPS | |
| | LGGPSVFLFPPKPKDTLMISRTPEVTCVVV | | VFIFPPSDEQLKSGT | |
| | DVSHEDPEVKFNWYVDGVEVHNAKTKPR | | ASVVCLLNNFYPRE | |
| | EEQYNSTYRVVSVLTVLHQDWLNGKEYK | | AKVQWKVDNALQS | |
| | CKVSNKALPAPIEKTISKAKQPREPQVYTL | | GNSQESVTEQDSKD | |
| | PPSREEMTKNQVSLTCLVKGFYPSDIAVE | | STYSLSSTLTLSKAD | |
| | WESNGQPENNYKTTPPVLDSDGSFFLYSK | | YEKHKVYACEVTHQ | |
| | LTVDKSRWQQGNVFSCSVMHEALHNHYT | | GLSSPVTKSFNRGEC | |
| | QKSLSLSPGK | | | |
| 42 | QVQLVQSGAEVKKPGASVKVSCKASGYT | 1668 | DIQMTQSPSSLSASV | 1756 |
| | FTDYFMHWVRQAPGQGLEWMGWINPNS | | GDRVTITCRASQGIS | |
| | GNTGYAQKFQGRVTMTRDTSTSTVYMEL | | NNLNWYQQKPGKA | |
| | SSLRSEDTAVYYCARLNDYGDYGGPATLD | | PKLLIYAASSLQSGV | |
| | YWGQGTLVTVSSSTKGPSVFPLAPSSKSTS | | PSRFSGSGSGTDFTL | |
| | GGTAALGCLVKDYFPEPVTVSWNSGALTS | | TISSLQPEDFATYYC | |
| | GVHTFPAVLQSSGLYSLSSVVTVPSSSLGT | | QQSYSTPPTFGQGTK | |
| | QTYICNVNHKPSNTKVDKKVDKTHTCPPC | | LEIKRTVAAPSVFIFP | |
| | PPELLGGPSVFLFPPKPKDTLMISRTPEVTC | | PSDEQLKSGTASVVC | |
| | VVVDVSHEDPEVKFNWYVDGVEVHNAKT | | LLNNFYPREAKVQW | |
| | KPREEQYNSTYRVVSVLTVLHQDWLNGK | | KVDNALQSGNSQES | |
| | EYKCKVSNKALPAPIEKTISKAKQPREPQV | | VTEQDSKDSTYSLSS | |
| | YTLPPSREEMTKNQVSLTCLVKGFYPSDIA | | TLTLSKADYEKHKV | |
| | VEWESNGQPENNYKTTPPVLDSDGSFFLY | | YACEVTHQGLSSPV | |
| | SKLTVDKSRWQQGNVFSCSVMHEALHNH | | TKSFNRGEC | |
| | YTQKSLSLSPGK | | | |
| 43 | QVQLVQSGAEVKKPGASVKVSCKASGYT | 1669 | DIQMTQSPSSLSASV | 1757 |
| | FTNYYMHWVRQAPGQGLEWLGWISPYSG | | GDRVTITCRASQSIST | |
| | DTKYAQTLQGRVTMTRDTSTSTVYMELSS | | YLNWYQQKPGKAP | |
| | LRSEDTAVYYCARESMDRLDYWGQGTLV | | KLLIYDASNLETGVP | |
| | TVSSSTKGPSVFPLAPSSKSTSGGTAALGC | | SRFSGSGSGTDFTLTI | |
| | LVKDYFPEPVTVSWNSGALTSGVHTFPAV | | SSLQPEDFATYYCQQ | |
| | LQSSGLYSLSSVVTVPSSSLGTQTYICNVN | | SYSTPVLTFGGGTKV | |
| | HKPSNTKVDKKVDKTHTCPPCPPELLGGP | | EIKRTVAAPSVFIFPP | |
| | SVFLFPPKPKDTLMISRTPEVTCVVVDVSH | | SDEQLKSGTASVVC | |
| | EDPEVKFNWYVDGVEVHNAKTKPREEQY | | LLNNFYPREAKVQW | |
| | NSTYRVVSVLTVLHQDWLNGKEYKCKVS | | KVDNALQSGNSQES | |
| | NKALPAPIEKTISKAKQPREPQVYTLPPSRE | | VTEQDSKDSTYSLSS | |
| | EMTKNQVSLTCLVKGFYPSDIAVEWESNG | | TLTLSKADYEKHKV | |
| | QPENNYKTTPPVLDSDGSFFLYSKLTVDKS | | YACEVTHQGLSSPV | |
| | RWQQGNVFSCSVMHEALHNHYTQKSLSL | | TKSFNRGEC | |
| | SPGK | | | |
| 44 | EVQLLESGGGLVQPGGSLRLSCAASGFTFS | 1670 | DIVMTQSPLSLPVTP | 1758 |
| | SYAMHWVRQAPGKGLEWVADISGSGGLT | | GEPASISCRSSQSLLH | |
| | YYADSVKGRFTISRDNSKNTLYLQMNSLR | | SNGYNYLDWYLQKP | |
| | AEDTAVYYCAREGDQYSSSSFFDYWGQG | | GQSPQLLIYLGSNRA | |
| | TLVTVSSSTKGPSVFPLAPSSKSTSGGTAA | | SGVPDRFSGSGSGTD | |
| | LGCLVKDYFPEPVTVSWNSGALTSGVHTF | | FTLKISRVEAEDVGV | |
| | PAVLQSSGLYSLSSVVTVPSSSLGTQTYIC | | YYCMQALQPPPTFG | |
| | NVNHKPSNTKVDKKVDKTHTCPPCPPELL | | QGTRLEIKRTVAAPS | |
| | GGPSVFLFPPKPKDTLMISRTPEVTCVVVD | | VFIFPPSDEQLKSGT | |
| | VSHEDPEVKFNWYVDGVEVHNAKTKPRE | | ASVVCLLNNFYPRE | |
| | EQYNSTYRVVSVLTVLHQDWLNGKEYKC | | AKVQWKVDNALQS | |
| | KVSNKALPAPIEKTISKAKQPREPQVYTLP | | GNSQESVTEQDSKD | |
| | PSREEMTKNQVSLTCLVKGFYPSDIAVEW | | STYSLSSTLTLSKAD | |
| | ESNGQPENNYKTTPPVLDSDGSFFLYSKLT | | YEKHKVYACEVTHQ | |
| | VDKSRWQQGNVFSCSVMHEALHNHYTQ | | GLSSPVTKSFNRGEC | |
| | KSLSLSPGK | | | |
| 45 | EVQLVESGGGLVKPGGSLRLSCAASGFTF | 1671 | DIQMTQSPSSLSASV | 1759 |
| | DEFGMNWVRQAPGKGLEWISYISGDSGYT | | GDRVTITCQASQDID | |
| | NCADSVKGRFTISRDDSKNTLYLQMNSLK | | IYLNWYQQKPGKAP | |
| | TEDTAVYYCAAGYGGYYFDYWGQGTLV | | KLLIYAASTLESGVP | |
| | TVSSSTKGPSVFPLAPSSKSTSGGTAALGC | | SRFSGSGSGTDFTLTI | |
| | LVKDYFPEPVTVSWNSGALTSGVHTFPAV | | SSLQPEDFATYYCQQ | |
| | LQSSGLYSLSSVVTVPSSSLGTQTYICNVN | | SYSTPPTFGGGTKVE | |
| | HKPSNTKVDKKVDKTHTCPPCPPELLGGP | | IKRTVAAPSVFIFPPS | |
| | SVFLFPPKPKDTLMISRTPEVTCVVVDVSH | | DEQLKSGTASVVCL | |
| | EDPEVKFNWYVDGVEVHNAKTKPREEQY | | LNNFYPREAKVQWK | |
| | NSTYRVVSVLTVLHQDWLNGKEYKCKVS | | VDNALQSGNSQESV | |
| | NKALPAPIEKTISKAKQPREPQVYTLPPSRE | | TEQDSKDSTYSLSST | |
| | EMTKNQVSLTCLVKGFYPSDIAVEWESNG | | LTLSKADYEKHKVY | |
| | QPENNYKTTPPVLDSDGSFFLYSKLTVDKS | | ACEVTHQGLSSPVT | |
| | RWQQGNVFSCSVMHEALHNHYTQKSLSL | | KSFNRGEC | |
| | SPGK | | | |
| 46 | QVQLVQSGAEVKKPGASVKVSCKASGYT | 1672 | DIQMTQSPSSLSASV | 1760 |
| | FTSYYMHWVRQAPGQGLEWMGMINPSA | | GDRVTITCRASQSIST | |
| | GSTSYAQKFQGRVTMTRDTSTSTVYMELS | | YLNWYQQKPGKAP | |
| | SLRSEDTAVYYCASVDSSGWYAPFDYWG | | KLLIYDASNLETGVP | |
| | QGTLVTVSSSTKGPSVFPLAPSSKSTSGGT | | SRFSGSGSGTDFTLTI | |
| | AALGCLVKDYFPEPVTVSWNSGALTSGVH | | SSLQPEDFATYYCQQ | |
| | TFPAVLQSSGLYSLSSVVTVPSSSLGTQTYI | | ANSFPPTFGGGTKVE | |
| | CNVNHKPSNTKVDKKVDKTHTCPPCPPEL | | IKRTVAAPSVFIFPPS | |
| | LGGPSVFLFPPKPKDTLMISRTPEVTCVVV | | DEQLKSGTASVVCL | |
| | DVSHEDPEVKFNWYVDGVEVHNAKTKPR | | LNNFYPREAKVQWK | |
| | EEQYNSTYRVVSVLTVLHQDWLNGKEYK | | VDNALQSGNSQESV | |
| | CKVSNKALPAPIEKTISKAKQPREPQVYTL | | TEQDSKDSTYSLSST | |
| | PPSREEMTKNQVSLTCLVKGFYPSDIAVE | | LTLSKADYEKHKVY | |
| | WESNGQPENNYKTTPPVLDSDGSFFLYSK | | ACEVTHQGLSSPVT | |
| | LTVDKSRWQQGNVFSCSVMHEALHNHYT | | KSFNRGEC | |
| | QKSLSLSPGK | | | |
| 47 | EVQLLESGGGLVQPGGSLRLSCAASGFTF | 1673 | DIVMTQSPLSLPVTP | 1761 |
| | DEYAMHWVRQAPGKGLEWVSAIGAGGST | | GEPASISCRSSQSLLH | |
| | YYADSVKGRFTISRDNSKNTLYLQMNSLR | | SNGYNYLDWYLQKP | |
| | AEDTAVYYCASSLGPELRGVDYYYYGMD | | GQSPQLLIYAASSLQ | |
| | VWGQGTTVTVSSSTKGPSVFPLAPSSKSTS | | SGVPDRFSGSGSGTD | |
| | GGTAALGCLVKDYFPEPVTVSWNSGALTS | | FTLKISRVEAEDVGV | |
| | GVHTFPAVLQSSGLYSLSSVVTVPSSSLGT | | YYCMQGIQWPWTF | |
| | QTYICNVNHKPSNTKVDKKVDKTHTCPPC | | GQGTKVEIKRTVAA | |
| | PPELLGGPSVFLFPPKPKDTLMISRTPEVTC | | PSVFIFPPSDEQLKSG | |
| | VVVDVSHEDPEVKFNWYVDGVEVHNAKT | | TASVVCLLNNFYPRE | |
| | KPREEQYNSTYRVVSVLTVLHQDWLNGK | | AKVQWKVDNALQS | |
| | EYKCKVSNKALPAPIEKTISKAKQPREPQV | | GNSQESVTEQDSKD | |
| | YTLPPSREEMTKNQVSLTCLVKGFYPSDIA | | STYSLSSTLTLSKAD | |
| | VEWESNGQPENNYKTTPPVLDSDGSFFLY | | YEKHKVYACEVTHQ | |
| | SKLTVDKSRWQQGNVFSCSVMHEALHNH | | GLSSPVTKSFNRGEC | |
| | YTQKSLSLSPGK | | | |
| 48 | EVQLLESGGGLVQPGGSLRLSCAASGFNF | 1674 | DIQMTQSPSSLSASV | 1762 |
| | DDYAMHWVRQAPGKGLEWVSVIYSGGST | | GDRVTITCRASQSIST | |
| | YYADSVKGRFTISRDNSKNTLYLQMNSLR | | YVNWYQQKPGKAP | |
| | AEDTAVYYCTRHDFDYWGQGTLVTVSSS | | KLLIYAASSLQSGVP | |
| | TKGPSVFPLAPSSKSTSGGTAALGCLVKDY | | SRFSGSGSGTDFTLTI | |
| | FPEPVTVSWNSGALTSGVHTFPAVLQSSGL | | SSLQPEDFATYYCQQ | |
| | YSLSSVVTVPSSSLGTQTYICNVNHKPSNT | | DYSYPYTFGQGTKV | |
| | KVDKKVDKTHTCPPCPPELLGGPSVFLFPP | | EIKRTVAAPSVFIFPP | |
| | KPKDTLMISRTPEVTCVVVDVSHEDPEVK | | SDEQLKSGTASVVC | |
| | FNWYVDGVEVHNAKTKPREEQYNSTYRV | | LLNNFYPREAKVQW | |
| | VSVLTVLHQDWLNGKEYKCKVSNKALPA | | KVDNALQSGNSQES | |
| | PIEKTISKAKQPREPQVYTLPPSREEMTKN | | VTEQDSKDSTYSLSS | |
| | QVSLTCLVKGFYPSDIAVEWESNGQPENN | | TLTLSKADYEKHKV | |
| | YKTTPPVLDSDGSFFLYSKLTVDKSRWQQ | | YACEVTHQGLSSPV | |
| | GNVFSCSVMHEALHNHYTQKSLSLSPGK | | TKSFNRGEC | |
| 49 | EVQLVESGGGLVKPGGSLRLSCAASGFTFS | 1675 | DIQMTQSPSSLSASV | 1763 |
| | DYALHWVRQAPGKGLEWVSLISGDGGST | | GDRVTITCRASQSIST | |
| | YYADSVKGRFTISRDDSKNTLYLQMNSLK | | WLAWYQQKPGKAP | |
| | TEDTAVYYCARDLGGERSYWGQGTLVTV | | KLLIYAASTLQSGVP | |
| | SSSTKGPSVFPLAPSSKSTSGGTAALGCLV | | SRFSGSGSGTDFTLTI | |
| | KDYFPEPVTVSWNSGALTSGVHTFPAVLQ | | SSLQPEDFATYYCLQ | |
| | SSGLYSLSSVVTVPSSSLGTQTYICNVNHK | | DYSYPPTFGQGTKV | |
| | PSNTKVDKKVDKTHTCPPCPPELLGGPSVF | | EIKRTVAAPSVFIFPP | |
| | LFPPKPKDTLMISRTPEVTCVVVDVSHEDP | | SDEQLKSGTASVVC | |
| | EVKFNWYVDGVEVHNAKTKPREEQYNST | | LLNNFYPREAKVQW | |
| | YRVVSVLTVLHQDWLNGKEYKCKVSNKA | | KVDNALQSGNSQES | |
| | LPAPIEKTISKAKQPREPQVYTLPPSREEMT | | VTEQDSKDSTYSLSS | |
| | KNQVSLTCLVKGFYPSDIAVEWESNGQPE | | TLTLSKADYEKHKV | |
| | NNYKTTPPVLDSDGSFFLYSKLTVDKSRW | | YACEVTHQGLSSPV | |
| | QQGNVFSCSVMHEALHNHYTQKSLSLSPG | | TKSFNRGEC | |
| | K | | | |
| 50 | QVQLVQSGAEVKKPGASVKVSCKASGYT | 1676 | DIQMTQSPSSLSASV | 1764 |
| | FTDYYMHWVRQAPGQGLEWMGIINPSDG | | GDRVTITCRASQSISS | |
| | STTYAQSFQGRVTMTRDTSTSTVYMELSS | | WLAWYQQKPGKAP | |
| | LRSEDTAVYYCARDELPDSSGWYGYFQH | | KLLIYAASSLQSGVP | |
| | WGQGTLVTVSSSTKGPSVFPLAPSSKSTSG | | SRFSGSGSGTDFTLTI | |
| | GTAALGCLVKDYFPEPVTVSWNSGALTSG | | SSLQPEDFATYYCQQ | |
| | VHTFPAVLQSSGLYSLSSVVTVPSSSLGTQ | | SYDIPLTFGGGTKVE | |
| | TYICNVNHKPSNTKVDKKVDKTHTCPPCP | | IKRTVAAPSVFIFPPS | |
| | PELLGGPSVFLFPPKPKDTLMISRTPEVTCV | | DEQLKSGTASVVCL | |
| | VVDVSHEDPEVKFNWYVDGVEVHNAKTK | | LNNFYPREAKVQWK | |
| | PREEQYNSTYRVVSVLTVLHQDWLNGKE | | VDNALQSGNSQESV | |
| | YKCKVSNKALPAPIEKTISKAKQPREPQVY | | TEQDSKDSTYSLSST | |
| | TLPPSREEMTKNQVSLTCLVKGFYPSDIAV | | LTLSKADYEKHKVY | |
| | EWESNGQPENNYKTTPPVLDSDGSFFLYS | | ACEVTHQGLSSPVT | |
| | KLTVDKSRWQQGNVFSCSVMHEALHNHY | | KSFNRGEC | |
| | TQKSLSLSPGK | | | |
| 51 | QVQLVQSGAEVKKPGSSVKVSCKASGGTF | 1677 | DIQMTQSPSSLSASV | 1765 |
| | SSYAISWVRQAPGQGLEWMGEIIPFFGTAN | | GDRVTITCQASQDIS | |
| | YAQKFQGRVTITADESTSTAYMELSSLRSE | | NLLNWYQQKPGKAP | |
| | DTAVYYCARAEYGGDLDYWGQGTLVTVS | | KLLIYAASTLQSGVP | |
| | SSTKGPSVFPLAPSSKSTSGGTAALGCLVK | | SRFSGSGSGTDFTLTI | |
| | DYFPEPVTVSWNSGALTSGVHTFPAVLQS | | SSLQPEDFATYYCQQ | |
| | SGLYSLSSVVTVPSSSLGTQTYICNVNHKP | | SYNTPWTFGPGTKV | |
| | SNTKVDKKVDKTHTCPPCPPELLGGPSVFL | | DIKRTVAAPSVFIFPP | |
| | FPPKPKDTLMISRTPEVTCVVVDVSHEDPE | | SDEQLKSGTASVVC | |
| | VKFNWYVDGVEVHNAKTKPREEQYNSTY | | LLNNFYPREAKVQW | |
| | RVVSVLTVLHQDWLNGKEYKCKVSNKAL | | KVDNALQSGNSQES | |
| | PAPIEKTISKAKQPREPQVYTLPPSREEMTK | | VTEQDSKDSTYSLSS | |
| | NQVSLTCLVKGFYPSDIAVEWESNGQPEN | | TLTLSKADYEKHKV | |
| | NYKTTPPVLDSDGSFFLYSKLTVDKSRWQ | | YACEVTHQGLSSPV | |
| | QGNVFSCSVMHEALHNHYTQKSLSLSPGK | | TKSFNRGEC | |
| 52 | QVQLVQSGAEVKKPGASVKVSCKASGDT | 1678 | DIQMTQSPSSLSASV | 1766 |
| | FTRHYVHWVRQAPGQGLEWMGIINPRGG | | GDRVTITCQASQDIH | |
| | THYAQKFQGRVTMTRDTSTSTVYMELSSL | | NYLNWYQQKPGKA | |
| | RSEDTAVYYCARRDCSGGSCYSDLDYWG | | PKLLIYQASSLESGV | |
| | QGTLVTVSSSTKGPSVFPLAPSSKSTSGGT | | PSRFSGSGSGTDFTL | |
| | AALGCLVKDYFPEPVTVSWNSGALTSGVH | | TISSLQPEDFATYYC | |
| | TFPAVLQSSGLYSLSSVVTVPSSSLGTQTYI | | QQANSFPLTFGGGT | |
| | CNVNHKPSNTKVDKKVDKTHTCPPCPPEL | | KLEIKRTVAAPSVFIF | |
| | LGGPSVFLFPPKPKDTLMISRTPEVTCVVV | | PPSDEQLKSGTASVV | |
| | DVSHEDPEVKFNWYVDGVEVHNAKTKPR | | CLLNNFYPREAKVQ | |
| | EEQYNSTYRVVSVLTVLHQDWLNGKEYK | | WKVDNALQSGNSQE | |
| | CKVSNKALPAPIEKTISKAKQPREPQVYTL | | SVTEQDSKDSTYSLS | |
| | PPSREEMTKNQVSLTCLVKGFYPSDIAVE | | STLTLSKADYEKHK | |
| | WESNGQPENNYKTTPPVLDSDGSFFLYSK | | VYACEVTHQGLSSP | |
| | LTVDKSRWQQGNVFSCSVMHEALHNHYT | | VTKSFNRGEC | |
| | QKSLSLSPGK | | | |
| 53 | QVQLVQSGAEVKKPGASVKVSCKASGGT | 1679 | DIQMTQSPSSLSASV | 1767 |
| | FSSYAISWVRQAPGQGLEWMGWINPDSG | | GDRVTITCRASQNIG | |
| | DASYARKFQGRVTMTRDTSTSTVYMELSS | | SWLAWYQQKPGKA | |
| | LRSEDTAVYYCATFGEEAFDIWGQGTMVT | | PKLLIYGASILQSGVP | |
| | VSSSTKGPSVFPLAPSSKSTSGGTAALGCL | | SRFSGSGSGTDFTLTI | |
| | VKDYFPEPVTVSWNSGALTSGVHTFPAVL | | SSLQPEDFATYYCQQ | |
| | QSSGLYSLSSVVTVPSSSLGTQTYICNVNH | | ANSFPLTFGGGTKLE | |
| | KPSNTKVDKKVDKTHTCPPCPPELLGGPS | | IKRTVAAPSVFIFPPS | |
| | VFLFPPKPKDTLMISRTPEVTCVVVDVSHE | | DEQLKSGTASVVCL | |
| | DPEVKFNWYVDGVEVHNAKTKPREEQYN | | LNNFYPREAKVQWK | |
| | STYRVVSVLTVLHQDWLNGKEYKCKVSN | | VDNALQSGNSQESV | |
| | KALPAPIEKTISKAKQPREPQVYTLPPSREE | | TEQDSKDSTYSLSST | |
| | MTKNQVSLTCLVKGFYPSDIAVEWESNGQ | | LTLSKADYEKHKVY | |
| | PENNYKTTPPVLDSDGSFFLYSKLTVDKSR | | ACEVTHQGLSSPVT | |
| | WQQGNVFSCSVMHEALHNHYTQKSLSLS | | KSFNRGEC | |
| | PGK | | | |
| 54 | QVQLVQSGAEVKKPGASVKVSCKASGGT | 1680 | DIQMTQSPSSLSASV | 1768 |
| | FSSYAISWVRQAPGQGLEWMGWIDPKNG | | GDRVTITCRASQGIG | |
| | DTNYAQKFQGRVTMTRDTSTSTVYMELSS | | NWLAWYQQKPGKA | |
| | LRSEDTAVYYCATEGSHHPYYYYGMDVW | | PKLLIYEASTLQSGV | |
| | GQGTTVTVSSSTKGPSVFPLAPSSKSTSGG | | PSRFSGSGSGTDFTL | |
| | TAALGCLVKDYFPEPVTVSWNSGALTSGV | | TISSLQPEDFATYYC | |
| | HTFPAVLQSSGLYSLSSVVTVPSSSLGTQT | | HQYNAYPWTFGQGT | |
| | YICNVNHKPSNTKVDKKVDKTHTCPPCPP | | KVEIKRTVAAPSVFI | |
| | ELLGGPSVFLFPPKPKDTLMISRTPEVTCV | | FPPSDEQLKSGTASV | |
| | VVDVSHEDPEVKFNWYVDGVEVHNAKTK | | VCLLNNFYPREAKV | |
| | PREEQYNSTYRVVSVLTVLHQDWLNGKE | | QWKVDNALQSGNS | |
| | YKCKVSNKALPAPIEKTISKAKQPREPQVY | | QESVTEQDSKDSTYS | |
| | TLPPSREEMTKNQVSLTCLVKGFYPSDIAV | | LSSTLTLSKADYEKH | |
| | EWESNGQPENNYKTTPPVLDSDGSFFLYS | | KVYACEVTHQGLSS | |
| | KLTVDKSRWQQGNVFSCSVMHEALHNHY | | PVTKSFNRGEC | |
| | TQKSLSLSPGK | | | |
| 55 | QVQLVQSGAEVKKPGASVKVSCKASGYT | 1681 | DIQMTQSPSSLSASV | 1769 |
| | FTGYHMHWVRQAPGQGLEWMGWINPNT | | GDRVTITCQASQDIS | |
| | GGTNYAQKFQGRVTMTRDTSTSTVYMEL | | NYLNWYQQKPGKA | |
| | SSLRSEDTAVYYCARPNTAMVPPYYYYY | | PKLLIYAASSLQSGV | |
| | GMDVWGQGTLVTVSSSTKGPSVFPLAPSS | | PSRFSGSGSGTDFTL | |
| | KSTSGGTAALGCLVKDYFPEPVTVSWNSG | | TISSLQPEDFATYYC | |
| | ALTSGVHTFPAVLQSSGLYSLSSVVTVPSS | | QQYNSYPLTFGQGT | |
| | SLGTQTYICNVNHKPSNTKVDKKVDKTHT | | KLEIKRTVAAPSVFIF | |
| | CPPCPPELLGGPSVFLFPPKPKDTLMISRTP | | PPSDEQLKSGTASVV | |
| | EVTCVVVDVSHEDPEVKFNWYVDGVEVH | | CLLNNFYPREAKVQ | |
| | NAKTKPREEQYNSTYRVVSVLTVLHQDW | | WKVDNALQSGNSQE | |
| | LNGKEYKCKVSNKALPAPIEKTISKAKQPR | | SVTEQDSKDSTYSLS | |
| | EPQVYTLPPSREEMTKNQVSLTCLVKGFY | | STLTLSKADYEKHK | |
| | PSDIAVEWESNGQPENNYKTTPPVLDSDG | | VYACEVTHQGLSSP | |
| | SFFLYSKLTVDKSRWQQGNVFSCSVMHEA | | VTKSFNRGEC | |
| | LHNHYTQKSLSLSPGK | | | |
| 56 | QVQLVQSGAEVKKPGASVKVSCKASGYT | 1682 | DIQMTQSPSSLSASV | 1770 |
| | FTSYDINWVRQAPGQGLEWMGWMNPNS | | GDRVTITCRASHSISS | |
| | GNTGYAQKFQGRVTMTRDTSTSTVYMEL | | WLAWYQQKPGKAP | |
| | SSLRSEDTAVYYCARVSATGTYGLDYWG | | KLLIYDASNLETGVP | |
| | QGTLVTVSSSTKGPSVFPLAPSSKSTSGGT | | SRFSGSGSGTDFTLTI | |
| | AALGCLVKDYFPEPVTVSWNSGALTSGVH | | SSLQPEDFATYYCQQ | |
| | TFPAVLQSSGLYSLSSVVTVPSSSLGTQTYI | | ADSFPLTFGGGTKVE | |
| | CNVNHKPSNTKVDKKVDKTHTCPPCPPEL | | IKRTVAAPSVFIFPPS | |
| | LGGPSVFLFPPKPKDTLMISRTPEVTCVVV | | DEQLKSGTASVVCL | |
| | DVSHEDPEVKFNWYVDGVEVHNAKTKPR | | LNNFYPREAKVQWK | |
| | EEQYNSTYRVVSVLTVLHQDWLNGKEYK | | VDNALQSGNSQESV | |
| | CKVSNKALPAPIEKTISKAKQPREPQVYTL | | TEQDSKDSTYSLSST | |
| | PPSREEMTKNQVSLTCLVKGFYPSDIAVE | | LTLSKADYEKHKVY | |
| | WESNGQPENNYKTTPPVLDSDGSFFLYSK | | ACEVTHQGLSSPVT | |
| | LTVDKSRWQQGNVFSCSVMHEALHNHYT | | KSFNRGEC | |
| | QKSLSLSPGK | | | |
| 57 | QVQLVQSGAEVKKPGASVKVSCKASGYT | 1683 | DIQMTQSPSSLSASV | 1771 |
| | FNNYGITWVRQAPGQGLEWMGIINPITGV | | GDRVTITCQASQDIN | |
| | TTYAQNFQGRVTMTRDTSTSTVYMELSSL | | DYLNWYQQKPGKA | |
| | RSEDTAVYYCASGEQQLVLFDYWGQGTL | | PKLLIYGASNLQSGV | |
| | VTVSSSTKGPSVFPLAPSSKSTSGGTAALG | | PSRFSGSGSGTDFTL | |
| | CLVKDYFPEPVTVSWNSGALTSGVHTFPA | | TISSLQPEDFATYYC | |
| | VLQSSGLYSLSSVVTVPSSSLGTQTYICNV | | LQHNSYPLTFGQGT | |
| | NHKPSNTKVDKKVDKTHTCPPCPPELLGG | | KLEIKRTVAAPSVFIF | |
| | PSVFLFPPKPKDTLMISRTPEVTCVVVDVS | | PPSDEQLKSGTASVV | |
| | HEDPEVKFNWYVDGVEVHNAKTKPREEQ | | CLLNNFYPREAKVQ | |
| | YNSTYRVVSVLTVLHQDWLNGKEYKCKV | | WKVDNALQSGNSQE | |
| | SNKALPAPIEKTISKAKQPREPQVYTLPPSR | | SVTEQDSKDSTYSLS | |
| | EEMTKNQVSLTCLVKGFYPSDIAVEWESN | | STLTLSKADYEKHK | |
| | GQPENNYKTTPPVLDSDGSFFLYSKLTVD | | VYACEVTHQGLSSP | |
| | KSRWQQGNVFSCSVMHEALHNHYTQKSL | | VTKSFNRGEC | |
| | SLSPGK | | | |
| 58 | QVQLVQSGAEVKKPGASVKVSCKASGYT | 1684 | DIQMTQSPSSLSASV | 1772 |
| | FTDYYLHWVRQAPGQGLEWMGWMNPNS | | GDRVTITCRASQGIS | |
| | GNTGYAQKFQGRVTMTRDTSTSTVYMEL | | NYLAWYQQKPGKA | |
| | SSLRSEDTAVYYCAADVITAYGMDVWGQ | | PKLLIYDASNLETGV | |
| | GTMVTVSSSTKGPSVFPLAPSSKSTSGGTA | | PSRFSGSGSGTDFTL | |
| | ALGCLVKDYFPEPVTVSWNSGALTSGVHT | | TISSLQPEDFATYYC | |
| | FPAVLQSSGLYSLSSVVTVPSSSLGTQTYIC | | QQSYNVPPTFGQGT | |
| | NVNHKPSNTKVDKKVDKTHTCPPCPPELL | | KVEIKRTVAAPSVFI | |
| | GGPSVFLFPPKPKDTLMISRTPEVTCVVVD | | FPPSDEQLKSGTASV | |
| | VSHEDPEVKFNWYVDGVEVHNAKTKPRE | | VCLLNNFYPREAKV | |
| | EQYNSTYRVVSVLTVLHQDWLNGKEYKC | | QWKVDNALQSGNS | |
| | KVSNKALPAPIEKTISKAKQPREPQVYTLP | | QESVTEQDSKDSTYS | |
| | PSREEMTKNQVSLTCLVKGFYPSDIAVEW | | LSSTLTLSKADYEKH | |
| | ESNGQPENNYKTTPPVLDSDGSFFLYSKLT | | KVYACEVTHQGLSS | |
| | VDKSRWQQGNVFSCSVMHEALHNHYTQ | | PVTKSFNRGEC | |
| | KSLSLSPGK | | | |
| 59 | EVQLLESGGGLVQPGGSLRLSCAASGFTFS | 1685 | DIQMTQSPSSLSASV | 1773 |
| | NAWMSWVRQAPGKGLEWVADISYDGTN | | GDRVTITCRASQSISS | |
| | DYYADSVKGRFTISRDNSKNTLYLQMNSL | | YLNWYQQKPGKAP | |
| | RAEDTAVYYCTTEELRFGGFDYWGQGTL | | KLLIYDASNLETGVP | |
| | VTVSSSTKGPSVFPLAPSSKSTSGGTAALG | | SRFSGSGSGTDFTLTI | |
| | CLVKDYFPEPVTVSWNSGALTSGVHTFPA | | SSLQPEDFATYYCQQ | |
| | VLQSSGLYSLSSVVTVPSSSLGTQTYICNV | | ANSFPLTFGQGTKVE | |
| | NHKPSNTKVDKKVDKTHTCPPCPPELLGG | | IKRTVAAPSVFIFPPS | |
| | PSVFLFPPKPKDTLMISRTPEVTCVVVDVS | | DEQLKSGTASVVCL | |
| | HEDPEVKFNWYVDGVEVHNAKTKPREEQ | | LNNFYPREAKVQWK | |
| | YNSTYRVVSVLTVLHQDWLNGKEYKCKV | | VDNALQSGNSQESV | |
| | SNKALPAPIEKTISKAKQPREPQVYTLPPSR | | TEQDSKDSTYSLSST | |
| | EEMTKNQVSLTCLVKGFYPSDIAVEWESN | | LTLSKADYEKHKVY | |
| | GQPENNYKTTPPVLDSDGSFFLYSKLTVD | | ACEVTHQGLSSPVT | |
| | KSRWQQGNVFSCSVMHEALHNHYTQKSL | | KSFNRGEC | |
| | SLSPGK | | | |
| 60 | QVQLVQSGAEVKKPGSSVKVSCKASGGTF | 1686 | EIVMTQSPATLSVSP | 1774 |
| | SSYAISWVRQAPGQGLEWMGGIIPMFGTA | | GERATLSCRASQSIG | |
| | NYAQKFQGRVTITADESTSTAYMELSSLRS | | TYLAWYQQKPGQAP | |
| | EDTAVYYCARDLGYSNAGGTLHYWGQGT | | RLLIYDASSRATGIP | |
| | LVTVSSSTKGPSVFPLAPSSKSTSGGTAAL | | ARFSGSGSGTEFTLTI | |
| | GCLVKDYFPEPVTVSWNSGALTSGVHTFP | | SSLQSEDFAVYYCQ | |
| | AVLQSSGLYSLSSVVTVPSSSLGTQTYICN | | QYKSYPLTFGGGTK | |
| | VNHKPSNTKVDKKVDKTHTCPPCPPELLG | | VEIKRTVAAPSVFIFP | |
| | GPSVFLFPPKPKDTLMISRTPEVTCVVVDV | | PSDEQLKSGTASVVC | |
| | SHEDPEVKFNWYVDGVEVHNAKTKPREE | | LLNNFYPREAKVQW | |
| | QYNSTYRVVSVLTVLHQDWLNGKEYKCK | | KVDNALQSGNSQES | |
| | VSNKALPAPIEKTISKAKQPREPQVYTLPPS | | VTEQDSKDSTYSLSS | |
| | REEMTKNQVSLTCLVKGFYPSDIAVEWES | | TLTLSKADYEKHKV | |
| | NGQPENNYKTTPPVLDSDGSFFLYSKLTV | | YACEVTHQGLSSPV | |
| | DKSRWQQGNVFSCSVMHEALHNHYTQKS | | TKSFNRGEC | |
| | LSLSPGK | | | |
| 61 | QVQLVQSGAEVKKPGASVKVSCKASGYT | 1687 | DIQMTQSPSSLSASV | 1775 |
| | FTNYYMHWVRQAPGQGLEWMGIINPSGG | | GDRVTITCQASQDIS | |
| | STSYAQKFQGRVTMTRDTSTSTVYMELSS | | NYLNWYQQKPGKA | |
| | LRSEDTAVYYCARAEWDILTGYYIDYWG | | PKLLIYGASSLQSGV | |
| | QGTLVTVSSSTKGPSVFPLAPSSKSTSGGT | | PSRFSGSGSGTDFTL | |
| | AALGCLVKDYFPEPVTVSWNSGALTSGVH | | TISSLQPEDFATYYC | |
| | TFPAVLQSSGLYSLSSVVTVPSSSLGTQTYI | | QQHNSYPWTFGQGT | |
| | CNVNHKPSNTKVDKKVDKTHTCPPCPPEL | | KVEIKRTVAAPSVFI | |
| | LGGPSVFLFPPKPKDTLMISRTPEVTCVVV | | FPPSDEQLKSGTASV | |
| | DVSHEDPEVKFNWYVDGVEVHNAKTKPR | | VCLLNNFYPREAKV | |
| | EEQYNSTYRVVSVLTVLHQDWLNGKEYK | | QWKVDNALQSGNS | |
| | CKVSNKALPAPIEKTISKAKQPREPQVYTL | | QESVTEQDSKDSTYS | |
| | PPSREEMTKNQVSLTCLVKGFYPSDIAVE | | LSSTLTLSKADYEKH | |
| | WESNGQPENNYKTTPPVLDSDGSFFLYSK | | KVYACEVTHQGLSS | |
| | LTVDKSRWQQGNVFSCSVMHEALHNHYT | | PVTKSFNRGEC | |
| | QKSLSLSPGK | | | |
| 62 | QVQLVQSGAEVKKPGASVKVSCKASGYT | 1688 | DIQMTQSPSSLSASV | 1776 |
| | FTDHFVHWVRQAPGQGLEWMGWISAYN | | GDRVTITCRASQGIH | |
| | GNTNYAQKFQGRVTMTRDTSTSTVYMEL | | NYLAWYQQKPGKA | |
| | SSLRSEDTAVYYCARAEYSYGFDYWGQG | | PKLLIYDASNLETGV | |
| | TLVTVSSSTKGPSVFPLAPSSKSTSGGTAA | | PSRFSGSGSGTDFTL | |
| | LGCLVKDYFPEPVTVSWNSGALTSGVHTF | | TISSLQPEDFATYYC | |
| | PAVLQSSGLYSLSSVVTVPSSSLGTQTYIC | | QQTSSFPYTFGQGTK | |
| | NVNHKPSNTKVDKKVDKTHTCPPCPPELL | | LEIKRTVAAPSVFIFP | |
| | GGPSVFLFPPKPKDTLMISRTPEVTCVVVD | | PSDEQLKSGTASVVC | |
| | VSHEDPEVKFNWYVDGVEVHNAKTKPRE | | LLNNFYPREAKVQW | |
| | EQYNSTYRVVSVLTVLHQDWLNGKEYKC | | KVDNALQSGNSQES | |
| | KVSNKALPAPIEKTISKAKQPREPQVYTLP | | VTEQDSKDSTYSLSS | |
| | PSREEMTKNQVSLTCLVKGFYPSDIAVEW | | TLTLSKADYEKHKV | |
| | ESNGQPENNYKTTPPVLDSDGSFFLYSKLT | | YACEVTHQGLSSPV | |
| | VDKSRWQQGNVFSCSVMHEALHNHYTQ | | TKSFNRGEC | |
| | KSLSLSPGK | | | |
| 63 | QVQLVQSGAEVKKPGASVKVSCKASGYT | 1689 | DIQMTQSPSSLSASV | 1777 |
| | FTGYYVHWVRQAPGQGLEWMGVINPSGG | | GDRVTITCQASQDIS | |
| | GSPSYAQKFQGRVTMTRDTSTSTVYMELS | | NYLNWYQQKPGKA | |
| | SLRSEDTAVYYCARDRSDVDYGMDVWG | | PKLLIYDASNLQSGV | |
| | QGTTVTVSSSTKGPSVFPLAPSSKSTSGGT | | PSRFSGSGSGTDFTL | |
| | AALGCLVKDYFPEPVTVSWNSGALTSGVH | | TISSLQPEDFATYYC | |
| | TFPAVLQSSGLYSLSSVVTVPSSSLGTQTYI | | LQHNSYPLTFGGGT | |
| | CNVNHKPSNTKVDKKVDKTHTCPPCPPEL | | KVEIKRTVAAPSVFI | |
| | LGGPSVFLFPPKPKDTLMISRTPEVTCVVV | | FPPSDEQLKSGTASV | |
| | DVSHEDPEVKFNWYVDGVEVHNAKTKPR | | VCLLNNFYPREAKV | |
| | EEQYNSTYRVVSVLTVLHQDWLNGKEYK | | QWKVDNALQSGNS | |
| | CKVSNKALPAPIEKTISKAKQPREPQVYTL | | QESVTEQDSKDSTYS | |
| | PPSREEMTKNQVSLTCLVKGFYPSDIAVE | | LSSTLTLSKADYEKH | |
| | WESNGQPENNYKTTPPVLDSDGSFFLYSK | | KVYACEVTHQGLSS | |
| | LTVDKSRWQQGNVFSCSVMHEALHNHYT | | PVTKSFNRGEC | |
| | QKSLSLSPGK | | | |
| 64 | QVQLVQSGAEVKKPGASVKVSCKASGYT | 1690 | DIVMTQSPLSLPVTP | 1778 |
| | FTDYYMHWVRQAPGQGLEWMGLIDPSGG | | GEPASISCRSSQSLLH | |
| | STNSLQKFQGRVTMTRDTSTSTVYMELSS | | SNGYNYLDWYLQKP | |
| | LRSEDTAVYYCARDVGFGELSFDIWGQGT | | GQSPQLLIYAASTLQ | |
| | TVTVSSSTKGPSVFPLAPSSKSTSGGTAAL | | SGVPDRFSGSGSGTD | |
| | GCLVKDYFPEPVTVSWNSGALTSGVHTFP | | FTLKISRVEAEDVGV | |
| | AVLQSSGLYSLSSVVTVPSSSLGTQTYICN | | YYCMQGTHWPPTFG | |
| | VNHKPSNTKVDKKVDKTHTCPPCPPELLG | | PGTKVDIKRTVAAPS | |
| | GPSVFLFPPKPKDTLMISRTPEVTCVVVDV | | VFIFPPSDEQLKSGT | |
| | SHEDPEVKFNWYVDGVEVHNAKTKPREE | | ASVVCLLNNFYPRE | |
| | QYNSTYRVVSVLTVLHQDWLNGKEYKCK | | AKVQWKVDNALQS | |
| | VSNKALPAPIEKTISKAKQPREPQVYTLPPS | | GNSQESVTEQDSKD | |
| | REEMTKNQVSLTCLVKGFYPSDIAVEWES | | STYSLSSTLTLSKAD | |
| | NGQPENNYKTTPPVLDSDGSFFLYSKLTV | | YEKHKVYACEVTHQ | |
| | DKSRWQQGNVFSCSVMHEALHNHYTQKS | | GLSSPVTKSFNRGEC | |
| | LSLSPGK | | | |
| 65 | QVQLVQSGAEVKKPGASVKVSCKASGYT | 1691 | DIQMTQSPSSLSASV | 1779 |
| | FTGYYMHWVRQAPGQGLEWMGWINPNS | | GDRVTITCRASQSIG | |
| | GGTNYAQKFQGRVTMTRDTSTSTVYMEL | | TYLNWYQQKPGKAP | |
| | SSLRSEDTAVYYCAREIGGYDNYYYYGM | | KLLIYAASSLQSGVP | |
| | DVWGQGTTVTVSSSTKGPSVFPLAPSSKST | | SRFSGSGSGTDFTLTI | |
| | SGGTAALGCLVKDYFPEPVTVSWNSGALT | | SSLQPEDFATYYCQQ | |
| | SGVHTFPAVLQSSGLYSLSSVVTVPSSSLG | | SYTDPWTFGQGTKV | |
| | TQTYICNVNHKPSNTKVDKKVDKTHTCPP | | EIKRTVAAPSVFIFPP | |
| | CPPELLGGPSVFLFPPKPKDTLMISRTPEVT | | SDEQLKSGTASVVC | |
| | CVVVDVSHEDPEVKFNWYVDGVEVHNA | | LLNNFYPREAKVQW | |
| | KTKPREEQYNSTYRVVSVLTVLHQDWLN | | KVDNALQSGNSQES | |
| | GKEYKCKVSNKALPAPIEKTISKAKQPREP | | VTEQDSKDSTYSLSS | |
| | QVYTLPPSREEMTKNQVSLTCLVKGFYPS | | TLTLSKADYEKHKV | |
| | DIAVEWESNGQPENNYKTTPPVLDSDGSF | | YACEVTHQGLSSPV | |
| | FLYSKLTVDKSRWQQGNVFSCSVMHEAL | | TKSFNRGEC | |
| | HNHYTQKSLSLSPGK | | | |
| 66 | QVQLVQSGAEVKKPGASVKVSCKASGYT | 1692 | DIQMTQSPSSLSASV | 1780 |
| | FNTYYMHWVRQAPGQGLEWMGWMHPN | | GDRVTITCRASQSIFS | |
| | TGNTGYAQKFQGRVTMTRDTSTSTVYME | | YLNWYQQKPGKAP | |
| | LSSLRSEDTAVYYCARGTTSDAFDIWGQG | | KLLIYSASNLQSGVP | |
| | TMVTVSSSTKGPSVFPLAPSSKSTSGGTAA | | SRFSGSGSGTDFTLTI | |
| | LGCLVKDYFPEPVTVSWNSGALTSGVHTF | | SSLQPEDFATYYCQQ | |
| | PAVLQSSGLYSLSSVVTVPSSSLGTQTYIC | | SYSTPITFGQGTKVEI | |
| | NVNHKPSNTKVDKKVDKTHTCPPCPPELL | | KRTVAAPSVFIFPPS | |
| | GGPSVFLFPPKPKDTLMISRTPEVTCVVVD | | DEQLKSGTASVVCL | |
| | VSHEDPEVKFNWYVDGVEVHNAKTKPRE | | LNNFYPREAKVQWK | |
| | EQYNSTYRVVSVLTVLHQDWLNGKEYKC | | VDNALQSGNSQESV | |
| | KVSNKALPAPIEKTISKAKQPREPQVYTLP | | TEQDSKDSTYSLSST | |
| | PSREEMTKNQVSLTCLVKGFYPSDIAVEW | | LTLSKADYEKHKVY | |
| | ESNGQPENNYKTTPPVLDSDGSFFLYSKLT | | ACEVTHQGLSSPVT | |
| | VDKSRWQQGNVFSCSVMHEALHNHYTQ | | KSFNRGEC | |
| | KSLSLSPGK | | | |
| 67 | QVQLVQSGAEVKKPGASVKVSCKASGDT | 1693 | DIQMTQSPSSLSASV | 1781 |
| | FTRHYVHWVRQAPGQGLEWMGRVNPRD | | GDRVTITCRASQGIS | |
| | GRTNSAQKFQGRVTMTRDTSTSTVYMELS | | SYLAWYQQKPGKAP | |
| | SLRSEDTAVYYCAKDMFPTVTGTYYYYG | | KLLIYDASNLETGVP | |
| | MDVWGQGTTVTVSSSTKGPSVFPLAPSSK | | SRFSGSGSGTDFTLTI | |
| | STSGGTAALGCLVKDYFPEPVTVSWNSGA | | SSLQPEDFATYYCQQ | |
| | LTSGVHTFPAVLQSSGLYSLSSVVTVPSSS | | ASGFPYTFGQGTRLE | |
| | LGTQTYICNVNHKPSNTKVDKKVDKTHTC | | IKRTVAAPSVFIFPPS | |
| | PPCPPELLGGPSVFLFPPKPKDTLMISRTPE | | DEQLKSGTASVVCL | |
| | VTCVVVDVSHEDPEVKFNWYVDGVEVHN | | LNNFYPREAKVQWK | |
| | AKTKPREEQYNSTYRVVSVLTVLHQDWL | | VDNALQSGNSQESV | |
| | NGKEYKCKVSNKALPAPIEKTISKAKQPRE | | TEQDSKDSTYSLSST | |
| | PQVYTLPPSREEMTKNQVSLTCLVKGFYP | | LTLSKADYEKHKVY | |
| | SDIAVEWESNGQPENNYKTTPPVLDSDGS | | ACEVTHQGLSSPVT | |
| | FFLYSKLTVDKSRWQQGNVFSCSVMHEA | | KSFNRGEC | |
| | LHNHYTQKSLSLSPGK | | | |
| 68 | QVQLVQSGAEVKKPGASVKVSCKASGYT | 1694 | DIQMTQSPSSLSASV | 1782 |
| | FSSYDINWVRQAPGQGLEWVGWINPRNG | | GDRVTITCRASQSIS | |
| | GTDYAQKFQGRVTMTRDTSTSTVYMELSS | | NYLNWYQQKPGKA | |
| | LRSEDTAVYYCARHRWELDSFDYWGQGT | | PKLLIYATSSLQSGV | |
| | LVTVSSSTKGPSVFPLAPSSKSTSGGTAAL | | PSRFSGSGSGTDFTL | |
| | GCLVKDYFPEPVTVSWNSGALTSGVHTFP | | TISSLQPEDFATYYC | |
| | AVLQSSGLYSLSSVVTVPSSSLGTQTYICN | | QQGYNIPFTFGQGTK | |
| | VNHKPSNTKVDKKVDKTHTCPPCPPELLG | | LEIKRTVAAPSVFIFP | |
| | GPSVFLFPPKPKDTLMISRTPEVTCVVVDV | | PSDEQLKSGTASVVC | |
| | SHEDPEVKFNWYVDGVEVHNAKTKPREE | | LLNNFYPREAKVQW | |
| | QYNSTYRVVSVLTVLHQDWLNGKEYKCK | | KVDNALQSGNSQES | |
| | VSNKALPAPIEKTISKAKQPREPQVYTLPPS | | VTEQDSKDSTYSLSS | |
| | REEMTKNQVSLTCLVKGFYPSDIAVEWES | | TLTLSKADYEKHKV | |
| | NGQPENNYKTTPPVLDSDGSFFLYSKLTV | | YACEVTHQGLSSPV | |
| | DKSRWQQGNVFSCSVMHEALHNHYTQKS | | TKSFNRGEC | |
| | LSLSPGK | | | |
| 69 | QVQLVQSGAEVKKPGASVKVSCKASGYT | 1695 | DIQMTQSPSSLSASV | 1783 |
| | FTSYYIHWVRQAPGQGLEWMGWMNPND | | GDRVTITCRASESISG | |
| | GKTAYAQRFQGRVTMTRDTSTSTVYMEL | | WLAWYQQKPGKAP | |
| | SSLRSEDTAVYYCARDDDYGGYVAYWGQ | | KLLIYDASNLETGVP | |
| | GTLVTVSSSTKGPSVFPLAPSSKSTSGGTA | | SRFSGSGSGTDFTLTI | |
| | ALGCLVKDYFPEPVTVSWNSGALTSGVHT | | SSLQPEDFATYYCQQ | |
| | FPAVLQSSGLYSLSSVVTVPSSSLGTQTYIC | | YDTWPFTFGPGTKV | |
| | NVNHKPSNTKVDKKVDKTHTCPPCPPELL | | DIKRTVAAPSVFIFPP | |
| | GGPSVFLFPPKPKDTLMISRTPEVTCVVVD | | SDEQLKSGTASVVC | |
| | VSHEDPEVKFNWYVDGVEVHNAKTKPRE | | LLNNFYPREAKVQW | |
| | EQYNSTYRVVSVLTVLHQDWLNGKEYKC | | KVDNALQSGNSQES | |
| | KVSNKALPAPIEKTISKAKQPREPQVYTLP | | VTEQDSKDSTYSLSS | |
| | PSREEMTKNQVSLTCLVKGFYPSDIAVEW | | TLTLSKADYEKHKV | |
| | ESNGQPENNYKTTPPVLDSDGSFFLYSKLT | | YACEVTHQGLSSPV | |
| | VDKSRWQQGNVFSCSVMHEALHNHYTQ | | TKSFNRGEC | |
| | KSLSLSPGK | | | |
| 70 | EVQLLESGGGLVQPGGSLRLSCAASGMSV | 1696 | DIQMTQSPSSLSASV | 1784 |
| | TSNHMSWVRQAPGKGLEWVSSIYPDGKT | | GDRVTITCQASQSIS | |
| | YYADSVKGRFTISRDNSKNTLYLQMNSLR | | NWLAWYQQKPGKA | |
| | AEDTAVYYCARDEEDWFDPWGQGTLVTV | | PKLLIYAASTLQSGV | |
| | SSSTKGPSVFPLAPSSKSTSGGTAALGCLV | | PSRFSGSGSGTDFTL | |
| | KDYFPEPVTVSWNSGALTSGVHTFPAVLQ | | TISSLQPEDFATYYC | |
| | SSGLYSLSSVVTVPSSSLGTQTYICNVNHK | | QQSYSTPWTFGQGT | |
| | PSNTKVDKKVDKTHTCPPCPPELLGGPSVF | | KVEIKRTVAAPSVFI | |
| | LFPPKPKDTLMISRTPEVTCVVVDVSHEDP | | FPPSDEQLKSGTASV | |
| | EVKFNWYVDGVEVHNAKTKPREEQYNST | | VCLLNNFYPREAKV | |
| | YRVVSVLTVLHQDWLNGKEYKCKVSNKA | | QWKVDNALQSGNS | |
| | LPAPIEKTISKAKQPREPQVYTLPPSREEMT | | QESVTEQDSKDSTYS | |
| | KNQVSLTCLVKGFYPSDIAVEWESNGQPE | | LSSTLTLSKADYEKH | |
| | NNYKTTPPVLDSDGSFFLYSKLTVDKSRW | | KVYACEVTHQGLSS | |
| | QQGNVFSCSVMHEALHNHYTQKSLSLSPG | | PVTKSFNRGEC | |
| | K | | | |
| 71 | EVQLLESGGGLVQPGGSLRLSCAASGFTFS | 1697 | DIQMTQSPSSLSASV | 1785 |
| | NHYMSWVRQAPGKGLEWVAVIWPDGSK | | GDRVTITCQASQDIS | |
| | EYYADSVKGRFTISRDNSKNTLYLQMNSL | | NYLNWYQQKPGKA | |
| | RAEDTAVYYCAREDYYGSGMDYWGQGT | | PKLLIYGASTLQSGV | |
| | LVTVSSSTKGPSVFPLAPSSKSTSGGTAAL | | PSRFSGSGSGTDFTL | |
| | GCLVKDYFPEPVTVSWNSGALTSGVHTFP | | TISSLQPEDFATYYC | |
| | AVLQSSGLYSLSSVVTVPSSSLGTQTYICN | | QQYDSYPPTFGGGT | |
| | VNHKPSNTKVDKKVDKTHTCPPCPPELLG | | KVEIKRTVAAPSVFI | |
| | GPSVFLFPPKPKDTLMISRTPEVTCVVVDV | | FPPSDEQLKSGTASV | |
| | SHEDPEVKFNWYVDGVEVHNAKTKPREE | | VCLLNNFYPREAKV | |
| | QYNSTYRVVSVLTVLHQDWLNGKEYKCK | | QWKVDNALQSGNS | |
| | VSNKALPAPIEKTISKAKQPREPQVYTLPPS | | QESVTEQDSKDSTYS | |
| | REEMTKNQVSLTCLVKGFYPSDIAVEWES | | LSSTLTLSKADYEKH | |
| | NGQPENNYKTTPPVLDSDGSFFLYSKLTV | | KVYACEVTHQGLSS | |
| | DKSRWQQGNVFSCSVMHEALHNHYTQKS | | PVTKSFNRGEC | |
| | LSLSPGK | | | |
| 72 | QVQLVQSGAEVKKPGASVKVSCKASGGT | 1698 | DIQMTQSPSSLSASV | 1786 |
| | FSNYAISWVRQAPGQGLEWMGWISAYNG | | GDRVTITCQASEDIN | |
| | NSDYAQNLQGRVTMTRDTSTSTVYMELSS | | KYLNWYQQKPGKA | |
| | LRSEDTAVYYCAIGDYFDYWGQGTLVTVS | | PKLLIYDASNLETGV | |
| | SSTKGPSVFPLAPSSKSTSGGTAALGCLVK | | PSRFSGSGSGTDFTL | |
| | DYFPEPVTVSWNSGALTSGVHTFPAVLQS | | TISSLQPEDFATYYC | |
| | SGLYSLSSVVTVPSSSLGTQTYICNVNHKP | | QQANSFPLTFGQGT | |
| | SNTKVDKKVDKTHTCPPCPPELLGGPSVFL | | KVEIKRTVAAPSVFI | |
| | FPPKPKDTLMISRTPEVTCVVVDVSHEDPE | | FPPSDEQLKSGTASV | |
| | VKFNWYVDGVEVHNAKTKPREEQYNSTY | | VCLLNNFYPREAKV | |
| | RVVSVLTVLHQDWLNGKEYKCKVSNKAL | | QWKVDNALQSGNS | |
| | PAPIEKTISKAKQPREPQVYTLPPSREEMTK | | QESVTEQDSKDSTYS | |
| | NQVSLTCLVKGFYPSDIAVEWESNGQPEN | | LSSTLTLSKADYEKH | |
| | NYKTTPPVLDSDGSFFLYSKLTVDKSRWQ | | KVYACEVTHQGLSS | |
| | QGNVFSCSVMHEALHNHYTQKSLSLSPGK | | PVTKSFNRGEC | |
| 73 | EVQLLESGGGLVQPGGSLRLSCAASGFTV | 1699 | DIQMTQSPSSLSASV | 1787 |
| | SSNYMSWVRQAPGKGLEWVAVIYSDGKT | | GDRVTITCRASQSIST | |
| | YYADSVKGRFTISRDNSKNTLYLQMNSLR | | YLNWYQQKPGKAP | |
| | AEDTAVYYCAREDSSGSHFDYWGQGTLV | | KLLIYDASNLETGVP | |
| | TVSSSTKGPSVFPLAPSSKSTSGGTAALGC | | SRFSGSGSGTDFTLTI | |
| | LVKDYFPEPVTVSWNSGALTSGVHTFPAV | | SSLQPEDFATYYCQQ | |
| | LQSSGLYSLSSVVTVPSSSLGTQTYICNVN | | AHSFPPTFGQGTRLE | |
| | HKPSNTKVDKKVDKTHTCPPCPPELLGGP | | IKRTVAAPSVFIFPPS | |
| | SVFLFPPKPKDTLMISRTPEVTCVVVDVSH | | DEQLKSGTASVVCL | |
| | EDPEVKFNWYVDGVEVHNAKTKPREEQY | | LNNFYPREAKVQWK | |
| | NSTYRVVSVLTVLHQDWLNGKEYKCKVS | | VDNALQSGNSQESV | |
| | NKALPAPIEKTISKAKQPREPQVYTLPPSRE | | TEQDSKDSTYSLSST | |
| | EMTKNQVSLTCLVKGFYPSDIAVEWESNG | | LTLSKADYEKHKVY | |
| | QPENNYKTTPPVLDSDGSFFLYSKLTVDKS | | ACEVTHQGLSSPVT | |
| | RWQQGNVFSCSVMHEALHNHYTQKSLSL | | KSFNRGEC | |
| | SPGK | | | |
| 74 | QVQLVQSGAEVKKPGSSVKVSCKASGYTF | 1700 | DIQMTQSPSSLSASV | 1788 |
| | TKYEINWVRQAPGQGLEWMGGIIPIFGTA | | GDRVTITCRASQGIS | |
| | NYAQKFQGRVTITADESTSTAYMELSSLRS | | NNLNWYQQKPGKA | |
| | EDTAVYYCARGSGWYTPLFDYWGQGTLV | | PKLLIYDASYLETGV | |
| | TVSSSTKGPSVFPLAPSSKSTSGGTAALGC | | PSRFSGSGSGTDFTL | |
| | LVKDYFPEPVTVSWNSGALTSGVHTFPAV | | TISSLQPEDFATYYC | |
| | LQSSGLYSLSSVVTVPSSSLGTQTYICNVN | | QQSYSAPLTFGQGT | |
| | HKPSNTKVDKKVDKTHTCPPCPPELLGGP | | KVEIKRTVAAPSVFI | |
| | SVFLFPPKPKDTLMISRTPEVTCVVVDVSH | | FPPSDEQLKSGTASV | |
| | EDPEVKFNWYVDGVEVHNAKTKPREEQY | | VCLLNNFYPREAKV | |
| | NSTYRVVSVLTVLHQDWLNGKEYKCKVS | | QWKVDNALQSGNS | |
| | NKALPAPIEKTISKAKQPREPQVYTLPPSRE | | QESVTEQDSKDSTYS | |
| | EMTKNQVSLTCLVKGFYPSDIAVEWESNG | | LSSTLTLSKADYEKH | |
| | QPENNYKTTPPVLDSDGSFFLYSKLTVDKS | | KVYACEVTHQGLSS | |
| | RWQQGNVFSCSVMHEALHNHYTQKSLSL | | PVTKSFNRGEC | |
| | SPGK | | | |
| 75 | QVQLVQSGAEVKKPGASVKVSCKASGYT | 1701 | EIVMTQSPATLSVSP | 1789 |
| | FTDYYIHWVRQAPGQGLEWMGLIDPSGGS | | GERATLSCRASQSVS | |
| | TSIAQKFQGRVTMTRDTSTSTVYMELSSLR | | SYLAWYQQKPGQAP | |
| | SEDTAVYYCARDYDILTGSGFDPWGQGTL | | RLLIYDASARATGIP | |
| | VTVSSSTKGPSVFPLAPSSKSTSGGTAALG | | ARFSGSGSGTEFTLTI | |
| | CLVKDYFPEPVTVSWNSGALTSGVHTFPA | | SSLQSEDFAVYYCQ | |
| | VLQSSGLYSLSSVVTVPSSSLGTQTYICNV | | QYRSSVTFGQGTRLE | |
| | NHKPSNTKVDKKVDKTHTCPPCPPELLGG | | IKRTVAAPSVFIFPPS | |
| | PSVFLFPPKPKDTLMISRTPEVTCVVVDVS | | DEQLKSGTASVVCL | |
| | HEDPEVKFNWYVDGVEVHNAKTKPREEQ | | LNNFYPREAKVQWK | |
| | YNSTYRVVSVLTVLHQDWLNGKEYKCKV | | VDNALQSGNSQESV | |
| | SNKALPAPIEKTISKAKQPREPQVYTLPPSR | | TEQDSKDSTYSLSST | |
| | EEMTKNQVSLTCLVKGFYPSDIAVEWESN | | LTLSKADYEKHKVY | |
| | GQPENNYKTTPPVLDSDGSFFLYSKLTVD | | ACEVTHQGLSSPVT | |
| | KSRWQQGNVFSCSVMHEALHNHYTQKSL | | KSFNRGEC | |
| | SLSPGK | | | |
| 76 | QVQLVQSGAEVKKPGASVKVSCKASGYT | 1702 | DIQMTQSPSSLSASV | 1790 |
| | FTTYYMHWVRQAPGQGLEWMGIINVSAG | | GDRVTITCQASQDIN | |
| | TTSYAQKFQGRVTMTRDTSTSTVYMELSS | | NYLNWYQQKPGKA | |
| | LRSEDTAVYYCAKEPYPHQSGWFFDYWG | | PKLLIYDASNLETGV | |
| | QGTLVTVSSSTKGPSVFPLAPSSKSTSGGT | | PSRFSGSGSGTDFTL | |
| | AALGCLVKDYFPEPVTVSWNSGALTSGVH | | TISSLQPEDFATYYC | |
| | TFPAVLQSSGLYSLSSVVTVPSSSLGTQTYI | | QQANSFPLTFGGGT | |
| | CNVNHKPSNTKVDKKVDKTHTCPPCPPEL | | KVEIKRTVAAPSVFI | |
| | LGGPSVFLFPPKPKDTLMISRTPEVTCVVV | | FPPSDEQLKSGTASV | |
| | DVSHEDPEVKFNWYVDGVEVHNAKTKPR | | VCLLNNFYPREAKV | |
| | EEQYNSTYRVVSVLTVLHQDWLNGKEYK | | QWKVDNALQSGNS | |
| | CKVSNKALPAPIEKTISKAKQPREPQVYTL | | QESVTEQDSKDSTYS | |
| | PPSREEMTKNQVSLTCLVKGFYPSDIAVE | | LSSTLTLSKADYEKH | |
| | WESNGQPENNYKTTPPVLDSDGSFFLYSK | | KVYACEVTHQGLSS | |
| | LTVDKSRWQQGNVFSCSVMHEALHNHYT | | PVTKSFNRGEC | |
| | QKSLSLSPGK | | | |
| 77 | QVQLVQSGAEVKKPGASVKVSCKASGYT | 1703 | EIVMTQSPATLSVSP | 1791 |
| | FTGHYMHWVRQAPGQGLEWMGWISTDN | | GERATLSCSASQSVG | |
| | GNANYAQKFQGRVTMTRDTSTSTVYMEL | | SSYFAWYQQKPGQA | |
| | SSLRSEDTAVYYCARDTADYYFDYWGQG | | PRLLIYDVSTRATGIP | |
| | TLVTVSSSTKGPSVFPLAPSSKSTSGGTAA | | ARFSGSGSGTEFTLTI | |
| | LGCLVKDYFPEPVTVSWNSGALTSGVHTF | | SSLQSEDFAVYYCQ | |
| | PAVLQSSGLYSLSSVVTVPSSSLGTQTYIC | | QYYSTPLTFGPGTKV | |
| | NVNHKPSNTKVDKKVDKTHTCPPCPPELL | | DIKRTVAAPSVFIFPP | |
| | GGPSVFLFPPKPKDTLMISRTPEVTCVVVD | | SDEQLKSGTASVVC | |
| | VSHEDPEVKFNWYVDGVEVHNAKTKPRE | | LLNNFYPREAKVQW | |
| | EQYNSTYRVVSVLTVLHQDWLNGKEYKC | | KVDNALQSGNSQES | |
| | KVSNKALPAPIEKTISKAKQPREPQVYTLP | | VTEQDSKDSTYSLSS | |
| | PSREEMTKNQVSLTCLVKGFYPSDIAVEW | | TLTLSKADYEKHKV | |
| | ESNGQPENNYKTTPPVLDSDGSFFLYSKLT | | YACEVTHQGLSSPV | |
| | VDKSRWQQGNVFSCSVMHEALHNHYTQ | | TKSFNRGEC | |
| | KSLSLSPGK | | | |
| 78 | QVQLVQSGAEVKKPGSSVKVSCKASGGTF | 1704 | DIQMTQSPSSLSASV | 1792 |
| | SRYPFSWVRQAPGQGLEWMGWMNPNNG | | GDRVTITCQASQDIS | |
| | DTGYAQKFQGRVTITADESTSTAYMELSS | | NYLNWYQQKPGKA | |
| | LRSEDTAVYYCARGDYPYMDVWGKGTT | | PKLLIYDASNLETGV | |
| | VTVSSSTKGPSVFPLAPSSKSTSGGTAALG | | PSRFSGSGSGTDFTL | |
| | CLVKDYFPEPVTVSWNSGALTSGVHTFPA | | TISSLQPEDFATYYC | |
| | VLQSSGLYSLSSVVTVPSSSLGTQTYICNV | | QQSYSIPYTFGQGTK | |
| | NHKPSNTKVDKKVDKTHTCPPCPPELLGG | | LEIKRTVAAPSVFIFP | |
| | PSVFLFPPKPKDTLMISRTPEVTCVVVDVS | | PSDEQLKSGTASVVC | |
| | HEDPEVKFNWYVDGVEVHNAKTKPREEQ | | LLNNFYPREAKVQW | |
| | YNSTYRVVSVLTVLHQDWLNGKEYKCKV | | KVDNALQSGNSQES | |
| | SNKALPAPIEKTISKAKQPREPQVYTLPPSR | | VTEQDSKDSTYSLSS | |
| | EEMTKNQVSLTCLVKGFYPSDIAVEWESN | | TLTLSKADYEKHKV | |
| | GQPENNYKTTPPVLDSDGSFFLYSKLTVD | | YACEVTHQGLSSPV | |
| | KSRWQQGNVFSCSVMHEALHNHYTQKSL | | TKSFNRGEC | |
| | SLSPGK | | | |
| 79 | QVQLVQSGAEVKKPGASVKVSCKASGYT | 1705 | DIQMTQSPSSLSASV | 1793 |
| | FTSDYMHWVRQAPGQGLEWMGWMNPNS | | GDRVTITCRASQGIR | |
| | GGTNYAQKFQGRVTMTRDTSTSTVYMEL | | NDLGWYQQKPGKA | |
| | SSLRSEDTAVYYCARDYITGPSDWGQGTL | | PKLLIYAASSLQPGV | |
| | VTVSSSTKGPSVFPLAPSSKSTSGGTAALG | | PSRFSGSGSGTDFTL | |
| | CLVKDYFPEPVTVSWNSGALTSGVHTFPA | | TISSLQPEDFATYYC | |
| | VLQSSGLYSLSSVVTVPSSSLGTQTYICNV | | LQTNSFPWTFGQGT | |
| | NHKPSNTKVDKKVDKTHTCPPCPPELLGG | | KLEIKRTVAAPSVFIF | |
| | PSVFLFPPKPKDTLMISRTPEVTCVVVDVS | | PPSDEQLKSGTASVV | |
| | HEDPEVKFNWYVDGVEVHNAKTKPREEQ | | CLLNNFYPREAKVQ | |
| | YNSTYRVVSVLTVLHQDWLNGKEYKCKV | | WKVDNALQSGNSQE | |
| | SNKALPAPIEKTISKAKQPREPQVYTLPPSR | | SVTEQDSKDSTYSLS | |
| | EEMTKNQVSLTCLVKGFYPSDIAVEWESN | | STLTLSKADYEKHK | |
| | GQPENNYKTTPPVLDSDGSFFLYSKLTVD | | VYACEVTHQGLSSP | |
| | KSRWQQGNVFSCSVMHEALHNHYTQKSL | | VTKSFNRGEC | |
| | SLSPGK | | | |
| 80 | QVQLVQSGAEVKKPGASVKVSCKASGFTF | 1706 | DIQMTQSPSSLSASV | 1794 |
| | TSYYMHWVRQAPGQGLEWMGWMNPNS | | GDRVTITCRASQSISS | |
| | GNTGYAQRFQGRVTMTRDTSTSTVYMEL | | WLAWYQQKPGKAP | |
| | SSLRSEDTAVYYCARGHSRTDYGMDVWG | | KLLIYDTSSLQSGVP | |
| | QGTTVTVSSSTKGPSVFPLAPSSKSTSGGT | | SRFSGSGSGTDFTLTI | |
| | AALGCLVKDYFPEPVTVSWNSGALTSGVH | | SSLQPEDFATYYCQQ | |
| | TFPAVLQSSGLYSLSSVVTVPSSSLGTQTYI | | GYSTPLTFGQGTKVE | |
| | CNVNHKPSNTKVDKKVDKTHTCPPCPPEL | | IKRTVAAPSVFIFPPS | |
| | LGGPSVFLFPPKPKDTLMISRTPEVTCVVV | | DEQLKSGTASVVCL | |
| | DVSHEDPEVKFNWYVDGVEVHNAKTKPR | | LNNFYPREAKVQWK | |
| | EEQYNSTYRVVSVLTVLHQDWLNGKEYK | | VDNALQSGNSQESV | |
| | CKVSNKALPAPIEKTISKAKQPREPQVYTL | | TEQDSKDSTYSLSST | |
| | PPSREEMTKNQVSLTCLVKGFYPSDIAVE | | LTLSKADYEKHKVY | |
| | WESNGQPENNYKTTPPVLDSDGSFFLYSK | | ACEVTHQGLSSPVT | |
| | LTVDKSRWQQGNVFSCSVMHEALHNHYT | | KSFNRGEC | |
| | QKSLSLSPGK | | | |
| 81 | EVQLLESGGGLVQPGGSLRLSCAASGFTFS | 1707 | DIQMTQSPSSLSASV | 1795 |
| | DHYMSWVRQAPGKGLEWVSIIYPDGKTY | | GDRVTITCQASQDIS | |
| | YADSVKGRFTISRDNSKNTLYLQMNSLRA | | NYLNWYQQKPGKA | |
| | EDTAVYYCAREGSYGDYDGMDVWGQGT | | PKLLIYGASTLQSGV | |
| | TVTVSSSTKGPSVFPLAPSSKSTSGGTAAL | | PSRFSGSGSGTDFTL | |
| | GCLVKDYFPEPVTVSWNSGALTSGVHTFP | | TISSLQPEDFATYYC | |
| | AVLQSSGLYSLSSVVTVPSSSLGTQTYICN | | QQSYSTPWTFGQGT | |
| | VNHKPSNTKVDKKVDKTHTCPPCPPELLG | | KLEIKRTVAAPSVFIF | |
| | GPSVFLFPPKPKDTLMISRTPEVTCVVVDV | | PPSDEQLKSGTASVV | |
| | SHEDPEVKFNWYVDGVEVHNAKTKPREE | | CLLNNFYPREAKVQ | |
| | QYNSTYRVVSVLTVLHQDWLNGKEYKCK | | WKVDNALQSGNSQE | |
| | VSNKALPAPIEKTISKAKQPREPQVYTLPPS | | SVTEQDSKDSTYSLS | |
| | REEMTKNQVSLTCLVKGFYPSDIAVEWES | | STLTLSKADYEKHK | |
| | NGQPENNYKTTPPVLDSDGSFFLYSKLTV | | VYACEVTHQGLSSP | |
| | DKSRWQQGNVFSCSVMHEALHNHYTQKS | | VTKSFNRGEC | |
| | LSLSPGK | | | |
| 82 | QVQLVQSGAEVKKPGSSVKVSCKASGGTF | 1708 | EIVMTQSPATLSVSP | 1796 |
| | SNYDISWVRQAPGQGLEWMGGIIPIFGTAN | | GERATLSCRASQSVS | |
| | YAQKFQGRVTITADESTSTAYMELSSLRSE | | SYLAWYQQKPGQAP | |
| | DTAVYYCAREAEEGGWFDPWGQGTLVTV | | RLLIYGASTRATGIP | |
| | SSSTKGPSVFPLAPSSKSTSGGTAALGCLV | | ARFSGSGSGTEFTLTI | |
| | KDYFPEPVTVSWNSGALTSGVHTFPAVLQ | | SSLQSEDFAVYYCQ | |
| | SSGLYSLSSVVTVPSSSLGTQTYICNVNHK | | QYAFSPITFGQGTKL | |
| | PSNTKVDKKVDKTHTCPPCPPELLGGPSVF | | EIKRTVAAPSVFIFPP | |
| | LFPPKPKDTLMISRTPEVTCVVVDVSHEDP | | SDEQLKSGTASVVC | |
| | EVKFNWYVDGVEVHNAKTKPREEQYNST | | LLNNFYPREAKVQW | |
| | YRVVSVLTVLHQDWLNGKEYKCKVSNKA | | KVDNALQSGNSQES | |
| | LPAPIEKTISKAKQPREPQVYTLPPSREEMT | | VTEQDSKDSTYSLSS | |
| | KNQVSLTCLVKGFYPSDIAVEWESNGQPE | | TLTLSKADYEKHKV | |
| | NNYKTTPPVLDSDGSFFLYSKLTVDKSRW | | YACEVTHQGLSSPV | |
| | QQGNVFSCSVMHEALHNHYTQKSLSLSPG | | TKSFNRGEC | |
| | K | | | |
| 83 | QVQLVQSGAEVKKPGASVKVSCKASGYT | 1709 | DIQMTQSPSSLSASV | 1797 |
| | FTDYYMHWVRQAPGQGLEWMGWMNPN | | GDRVTITCRVSQGIS | |
| | SGYTAYAQKFQGRVTMTRDTSTSTVYME | | SYLNWYQQKPGKAP | |
| | LSSLRSEDTAVYYCAKDTPGSGWSSGMD | | KLLIYDASNLETGVP | |
| | VWGQGTTVTVSSSTKGPSVFPLAPSSKSTS | | SRFSGSGSGTDFTLTI | |
| | GGTAALGCLVKDYFPEPVTVSWNSGALTS | | SSLQPEDFATYYCQQ | |
| | GVHTFPAVLQSSGLYSLSSVVTVPSSSLGT | | SYSTPLTFGGGTKVE | |
| | QTYICNVNHKPSNTKVDKKVDKTHTCPPC | | IKRTVAAPSVFIFPPS | |
| | PPELLGGPSVFLFPPKPKDTLMISRTPEVTC | | DEQLKSGTASVVCL | |
| | VVVDVSHEDPEVKFNWYVDGVEVHNAKT | | LNNFYPREAKVQWK | |
| | KPREEQYNSTYRVVSVLTVLHQDWLNGK | | VDNALQSGNSQESV | |
| | EYKCKVSNKALPAPIEKTISKAKQPREPQV | | TEQDSKDSTYSLSST | |
| | YTLPPSREEMTKNQVSLTCLVKGFYPSDIA | | LTLSKADYEKHKVY | |
| | VEWESNGQPENNYKTTPPVLDSDGSFFLY | | ACEVTHQGLSSPVT | |
| | SKLTVDKSRWQQGNVFSCSVMHEALHNH | | KSFNRGEC | |
| | YTQKSLSLSPGK | | | |
| 84 | QVQLVQSGAEVKKPGASVKVSCKASGGT | 1710 | DIQMTQSPSSLSASV | 1798 |
| | FSNYAISWVRQAPGQGLEWMGWINPNSG | | GDRVTITCRASQSISS | |
| | GTNYAQKFQGRVTMTRDTSTSTVYMELSS | | WLAWYQQKPGKAP | |
| | LRSEDTAVYYCARVGYYDSSGGGMDVW | | KLLIYDASNLETGVP | |
| | GQGTTVTVSSSTKGPSVFPLAPSSKSTSGG | | SRFSGSGSGTDFTLTI | |
| | TAALGCLVKDYFPEPVTVSWNSGALTSGV | | SSLQPEDFATYYCLQ | |
| | HTFPAVLQSSGLYSLSSVVTVPSSSLGTQT | | THSFPLTFGPGTKVD | |
| | YICNVNHKPSNTKVDKKVDKTHTCPPCPP | | IKRTVAAPSVFIFPPS | |
| | ELLGGPSVFLFPPKPKDTLMISRTPEVTCV | | DEQLKSGTASVVCL | |
| | VVDVSHEDPEVKFNWYVDGVEVHNAKTK | | LNNFYPREAKVQWK | |
| | PREEQYNSTYRVVSVLTVLHQDWLNGKE | | VDNALQSGNSQESV | |
| | YKCKVSNKALPAPIEKTISKAKQPREPQVY | | TEQDSKDSTYSLSST | |
| | TLPPSREEMTKNQVSLTCLVKGFYPSDIAV | | LTLSKADYEKHKVY | |
| | EWESNGQPENNYKTTPPVLDSDGSFFLYS | | ACEVTHQGLSSPVT | |
| | KLTVDKSRWQQGNVFSCSVMHEALHNHY | | KSFNRGEC | |
| | TQKSLSLSPGK | | | |
| 85 | QVQLVQSGAEVKKPGASVKVSCKASGYT | 1711 | DIQMTQSPSSLSASV | 1799 |
| | FTGYYMHWVRQAPGQGLEWMGIINPIGG | | GDRVTITCRASQSVS | |
| | LTTYAQKFQGRVTMTRDTSTSTVYMELSS | | NWLAWYQQKPGKA | |
| | LRSEDTAVYYCASGAYGDYVDWYFDLW | | PKLLIYDASNLQTGV | |
| | GRGTLVTVSSSTKGPSVFPLAPSSKSTSGG | | PSRFSGSGSGTDFTL | |
| | TAALGCLVKDYFPEPVTVSWNSGALTSGV | | TISSLQPEDFATYYC | |
| | HTFPAVLQSSGLYSLSSVVTVPSSSLGTQT | | QQANSFPLTFGGGT | |
| | YICNVNHKPSNTKVDKKVDKTHTCPPCPP | | KLEIKRTVAAPSVFIF | |
| | ELLGGPSVFLFPPKPKDTLMISRTPEVTCV | | PPSDEQLKSGTASVV | |
| | VVDVSHEDPEVKFNWYVDGVEVHNAKTK | | CLLNNFYPREAKVQ | |
| | PREEQYNSTYRVVSVLTVLHQDWLNGKE | | WKVDNALQSGNSQE | |
| | YKCKVSNKALPAPIEKTISKAKQPREPQVY | | SVTEQDSKDSTYSLS | |
| | TLPPSREEMTKNQVSLTCLVKGFYPSDIAV | | STLTLSKADYEKHK | |
| | EWESNGQPENNYKTTPPVLDSDGSFFLYS | | VYACEVTHQGLSSP | |
| | KLTVDKSRWQQGNVFSCSVMHEALHNHY | | VTKSFNRGEC | |
| | TQKSLSLSPGK | | | |
| 86 | QVQLVQSGAEVKKPGASVKVSCKASGYT | 1712 | DIVMTQSPLSLPVTP | 1800 |
| | FTTYGISWVRQAPGQGLEWMGWINPNSG | | GEPASISCRSSRSLLH | |
| | DTNYAQKFQGRVTMTRDTSTSTVYMELSS | | SNGYNYLDWYLQKP | |
| | LRSEDTAVYYCARLTTATDSFDLWGRGTL | | GQSPQLLIYLGSYRA | |
| | VTVSSSTKGPSVFPLAPSSKSTSGGTAALG | | SGVPDRFSGSGSGTD | |
| | CLVKDYFPEPVTVSWNSGALTSGVHTFPA | | FTLKISRVEAEDVGV | |
| | VLQSSGLYSLSSVVTVPSSSLGTQTYICNV | | YYCMQGTHWPPTFG | |
| | NHKPSNTKVDKKVDKTHTCPPCPPELLGG | | QGTKLEIKRTVAAPS | |
| | PSVFLFPPKPKDTLMISRTPEVTCVVVDVS | | VFIFPPSDEQLKSGT | |
| | HEDPEVKFNWYVDGVEVHNAKTKPREEQ | | ASVVCLLNNFYPRE | |
| | YNSTYRVVSVLTVLHQDWLNGKEYKCKV | | AKVQWKVDNALQS | |
| | SNKALPAPIEKTISKAKQPREPQVYTLPPSR | | GNSQESVTEQDSKD | |
| | EEMTKNQVSLTCLVKGFYPSDIAVEWESN | | STYSLSSTLTLSKAD | |
| | GQPENNYKTTPPVLDSDGSFFLYSKLTVD | | YEKHKVYACEVTHQ | |
| | KSRWQQGNVFSCSVMHEALHNHYTQKSL | | GLSSPVTKSFNRGEC | |
| | SLSPGK | | | |
| 87 | QVQLVQSGAEVKKPGASVKVSCKASGYS | 1713 | DIQMTQSPSSLSASV | 1801 |
| | FTNYYIHWVRQAPGQGLEWMGWMNPYT | | GDRVTITCRASQSIS | |
| | GQTGYAQKFQGRVTMTRDTSTSTVYMEL | | RYLNWYQQKPGKA | |
| | SSLRSEDTAVYYCTTDEETMDFHLWGRGT | | PKLLIYDASNLETGV | |
| | LVTVSSSTKGPSVFPLAPSSKSTSGGTAAL | | PSRFSGSGSGTDFTL | |
| | GCLVKDYFPEPVTVSWNSGALTSGVHTFP | | TISSLQPEDFATYYC | |
| | AVLQSSGLYSLSSVVTVPSSSLGTQTYICN | | QQSYSTPWTFGQGT | |
| | VNHKPSNTKVDKKVDKTHTCPPCPPELLG | | KLEIKRTVAAPSVFIF | |
| | GPSVFLFPPKPKDTLMISRTPEVTCVVVDV | | PPSDEQLKSGTASVV | |
| | SHEDPEVKFNWYVDGVEVHNAKTKPREE | | CLLNNFYPREAKVQ | |
| | QYNSTYRVVSVLTVLHQDWLNGKEYKCK | | WKVDNALQSGNSQE | |
| | VSNKALPAPIEKTISKAKQPREPQVYTLPPS | | SVTEQDSKDSTYSLS | |
| | REEMTKNQVSLTCLVKGFYPSDIAVEWES | | STLTLSKADYEKHK | |
| | NGQPENNYKTTPPVLDSDGSFFLYSKLTV | | VYACEVTHQGLSSP | |
| | DKSRWQQGNVFSCSVMHEALHNHYTQKS | | VTKSFNRGEC | |
| | LSLSPGK | | | |
| 88 | QVQLVQSGAEVKKPGASVKVSCKASGYT | 1714 | DIVMTQSPLSLPVTP | 1802 |
| | FTGYHIHWVRQAPGQGLEWMGRINPNSG | | GEPASISCRSSRSLLH | |
| | GTDYAQKFQGRVTMTRDTSTSTVYMELSS | | SNGYNYLDWYLQKP | |
| | LRSEDTAVYYCARETYSGSYEESFDYWGQ | | GQSPQLLIYLGSDRA | |
| | GTLVTVSSSTKGPSVFPLAPSSKSTSGGTA | | SGVPDRFSGSGSGTD | |
| | ALGCLVKDYFPEPVTVSWNSGALTSGVHT | | FTLKISRVEAEDVGV | |
| | FPAVLQSSGLYSLSSVVTVPSSSLGTQTYIC | | YYCMQGTHWPPTFG | |
| | NVNHKPSNTKVDKKVDKTHTCPPCPPELL | | QGTKVEIKRTVAAPS | |
| | GGPSVFLFPPKPKDTLMISRTPEVTCVVVD | | VFIFPPSDEQLKSGT | |
| | VSHEDPEVKFNWYVDGVEVHNAKTKPRE | | ASVVCLLNNFYPRE | |
| | EQYNSTYRVVSVLTVLHQDWLNGKEYKC | | AKVQWKVDNALQS | |
| | KVSNKALPAPIEKTISKAKQPREPQVYTLP | | GNSQESVTEQDSKD | |
| | PSREEMTKNQVSLTCLVKGFYPSDIAVEW | | STYSLSSTLTLSKAD | |
| | ESNGQPENNYKTTPPVLDSDGSFFLYSKLT | | YEKHKVYACEVTHQ | |
| | VDKSRWQQGNVFSCSVMHEALHNHYTQ | | GLSSPVTKSFNRGEC | |
| | KSLSLSPGK | | | |

TABLE 15
IgG4 Antibodies
Antibody (mAb) Examples 89-130 target CD33, and 131-176
target CLL-1.

| mAb | | SEQ | | SEQ |
|---|---|---|---|---|
| Ex. | Heavy Chain | ID NO | Light Chain | ID NO |
| 89 | QVQLVQSGAEVKKPGASVKVSCKASGYS | 1803 | DIQMTQSPSSLSASVG | 1891 |
| | FTGYYIHWVRQAPGQGLEWMGWINPNS | | DRVTITCRASQTINDW | |
| | GGTNYAQKFQGRVTMTRDTSTSTVYMEL | | LAWYQQKPGKAPKLL | |
| | SSLRSEDTAVYYCARDQWDGYNSGYFD | | IYSASTLHSGVPSRFSG | |
| | YWGQGTLVTVSSSTKGPSVFPLAPCSRST | | SGSGTDFTLTISSLQPE | |
| | SESTAALGCLVKDYFPEPVTVSWNSGALT | | DFATYYCQQAYSTPW | |
| | SGVHTFPAVLQSSGLYSLSSVVTVPSSSLG | | TFGQGTKVEIKRTVAA | |
| | TKTYTCNVDHKPSNTKVDKRVSKYGPPC | | PSVFIFPPSDEQLKSGT | |
| | PSCPPEFLGGPSVFLFPPKPKDTLMISRTPE | | ASVVCLLNNFYPREA | |
| | VTCVVVDVSQEDPEVQFNWYVDGVEVH | | KVQWKVDNALQSGN | |
| | NAKTKPREEQFNSTYRVVSVLTVLHQDW | | SQESVTEQDSKDSTYS | |
| | LNGKEYKCKVSNKGLPSSIEKTISKAKQP | | LSSTLTLSKADYEKHK | |
| | REPQVYTLPPSQEEMTKNQVSLTCLVKGF | | VYACEVTHQGLSSPV | |
| | YPSDIAVEWESNGQPENNYKTTPPVLDSD | | TKSFNRGEC | |
| | GSFFLYSRLTVDKSRWQEGNVFSCSVMH | | | |
| | EALHNHYTQKSLSLSLGK | | | |
| 90 | EVQLLESGGGLVQPGGSLRLSCAASGFTF | 1804 | DIQMTQSPSSLSASVG | 1892 |
| | SDYYMSWVRQAPGKGLEWVSGISGSGYS | | DRVTITCRASQSISRYL | |
| | TYYADSVKGRFTISRDNSKNTLYLQMNS | | NWYQQKPGKAPKLLI | |
| | LRAEDTAVYYCARTFGRGPDWYFDLWG | | YTASTLQSGVPSRFSG | |
| | RGTLVTVSSSTKGPSVFPLAPCSRSTSEST | | SGSGTDFTLTISSLQPE | |
| | AALGCLVKDYFPEPVTVSWNSGALTSGV | | DFATYYCQQYDDLPL | |
| | HTFPAVLQSSGLYSLSSVVTVPSSSLGTKT | | TFGGGTKVEIKRTVAA | |
| | YTCNVDHKPSNTKVDKRVSKYGPPCPSC | | PSVFIFPPSDEQLKSGT | |
| | PPEFLGGPSVFLFPPKPKDTLMISRTPEVT | | ASVVCLLNNFYPREA | |
| | CVVVDVSQEDPEVQFNWYVDGVEVHNA | | KVQWKVDNALQSGN | |
| | KTKPREEQFNSTYRVVSVLTVLHQDWLN | | SQESVTEQDSKDSTYS | |
| | GKEYKCKVSNKGLPSSIEKTISKAKQPREP | | LSSTLTLSKADYEKHK | |
| | QVYTLPPSQEEMTKNQVSLTCLVKGFYPS | | VYACEVTHQGLSSPV | |
| | DIAVEWESNGQPENNYKTTPPVLDSDGSF | | TKSFNRGEC | |
| | FLYSRLTVDKSRWQEGNVFSCSVMHEAL | | | |
| | HNHYTQKSLSLSLGK | | | |
| 91 | EVQLLESGGGLVQPGGSLRLSCAASGFTF | 1805 | DIQMTQSPSSLSASVG | 1893 |
| | SNSDMNWVRQAPGKGLEWVSAISGSGGS | | DRVTITCRASQSISSYL | |
| | TYYADSVKGRFTISRDNSKNTLYLQMNS | | NWYQQKPGKAPKLLI | |
| | LRAEDTAVYYCARGREDDYGDYVFDYW | | YGASTLHSGVPSRFSG | |
| | GQGTLVTVSSSTKGPSVFPLAPCSRSTSES | | SGSGTDFTLTISSLQPE | |
| | TAALGCLVKDYFPEPVTVSWNSGALTSG | | DFATYYCQQSYRIPYT | |
| | VHTFPAVLQSSGLYSLSSVVTVPSSSLGTK | | FGQGTKLEIKRTVAAP | |
| | TYTCNVDHKPSNTKVDKRVSKYGPPCPS | | SVFIFPPSDEQLKSGTA | |
| | CPPEFLGGPSVFLFPPKPKDTLMISRTPEV | | SVVCLLNNFYPREAK | |
| | TCVVVDVSQEDPEVQFNWYVDGVEVHN | | VQWKVDNALQSGNS | |
| | AKTKPREEQFNSTYRVVSVLTVLHQDWL | | QESVTEQDSKDSTYSL | |
| | NGKEYKCKVSNKGLPSSIEKTISKAKQPR | | SSTLTLSKADYEKHKV | |
| | EPQVYTLPPSQEEMTKNQVSLTCLVKGFY | | YACEVTHQGLSSPVT | |
| | PSDIAVEWESNGQPENNYKTTPPVLDSDG | | KSFNRGEC | |
| | SFFLYSRLTVDKSRWQEGNVFSCSVMHE | | | |
| | ALHNHYTQKSLSLSLGK | | | |
| 92 | QVQLVQSGAEVKKPGASVKVSCKASGGT | 1806 | EIVMTQSPATLSVSPG | 1894 |
| | FSSYAISWVRQAPGQGLEWMGWINPNSG | | ERATLSCRASQNINSD | |
| | NTGYAQKFQGRVTMTRDTSTSTVYMELS | | LAWYQQKPGQAPRLL | |
| | SLRSEDTAVYYCAREHGDMDVWGQGTT | | IYGASTRATGIPARFSG | |
| | VTVSSSTKGPSVFPLAPCSRSTSESTAALG | | SGSGTEFTLTISSLQSE | |
| | CLVKDYFPEPVTVSWNSGALTSGVHTFP | | DFAVYYCQQYDSLPF | |
| | AVLQSSGLYSLSSVVTVPSSSLGTKTYTC | | TFGPGTKVDIKRTVAA | |
| | NVDHKPSNTKVDKRVSKYGPPCPSCPPEF | | PSVFIFPPSDEQLKSGT | |
| | LGGPSVFLFPPKPKDTLMISRTPEVTCVVV | | ASVVCLLNNFYPREA | |
| | DVSQEDPEVQFNWYVDGVEVHNAKTKP | | KVQWKVDNALQSGN | |
| | REEQFNSTYRVVSVLTVLHQDWLNGKEY | | SQESVTEQDSKDSTYS | |
| | KCKVSNKGLPSSIEKTISKAKQPREPQVYT | | LSSTLTLSKADYEKHK | |
| | LPPSQEEMTKNQVSLTCLVKGFYPSDIAV | | VYACEVTHQGLSSPV | |
| | EWESNGQPENNYKTTPPVLDSDGSFFLYS | | TKSFNRGEC | |
| | RLTVDKSRWQEGNVFSCSVMHEALHNH | | | |
| | YTQKSLSLSLGK | | | |
| 93 | QVQLVQSGAEVKKPGASVKVSCKASGNT | 1807 | DIVMTQSPLSLPVTPG | 1895 |
| | FTSYGISWVRQAPGQGLEWMGWINPNSG | | EPASISCRSSQSLLHSN | |
| | GTKYAQKFQGRVTMTRDTSTSTVYMELS | | GYNYLDWYLQKPGQS | |
| | SLRSEDTAVYYCARESWFGELYYGMDV | | PQLLIYLGSDRASGVP | |
| | WGKGTTVTVSSSTKGPSVFPLAPCSRSTS | | DRFSGSGSGTDFTLKIS | |
| | ESTAALGCLVKDYFPEPVTVSWNSGALTS | | RVEAEDVGVYYCMQ | |
| | GVHTFPAVLQSSGLYSLSSVVTVPSSSLGT | | GLQTPITFGQGTRLEIK | |
| | KTYTCNVDHKPSNTKVDKRVSKYGPPCP | | RTVAAPSVFIFPPSDEQ | |
| | SCPPEFLGGPSVFLFPPKPKDTLMISRTPE | | LKSGTASVVCLLNNF | |
| | VTCVVVDVSQEDPEVQFNWYVDGVEVH | | YPREAKVQWKVDNA | |
| | NAKTKPREEQFNSTYRVVSVLTVLHQDW | | LQSGNSQESVTEQDSK | |
| | LNGKEYKCKVSNKGLPSSIEKTISKAKQP | | DSTYSLSSTLTLSKAD | |
| | REPQVYTLPPSQEEMTKNQVSLTCLVKGF | | YEKHKVYACEVTHQG | |
| | YPSDIAVEWESNGQPENNYKTTPPVLDSD | | LSSPVTKSFNRGEC | |
| | GSFFLYSRLTVDKSRWQEGNVFSCSVMH | | | |
| | EALHNHYTQKSLSLSLGK | | | |
| 94 | QVQLVQSGAEVKKPGASVKVSCKASGYT | 1808 | DIQMTQSPSSLSASVG | 1896 |
| | FTAYYTHWVRQAPGQGLEWMGWMNPN | | DRVTITCRASQSISSYL | |
| | SGHTSYAQKFQGRVTMTRDTSTSTVYME | | NWYQQKPGKAPKLLI | |
| | LSSLRSEDTAVYYCAREAYDSFDYWGQG | | YEASTLETGVPSRFSG | |
| | TLVTVSSSTKGPSVFPLAPCSRSTSESTAA | | SGSGTDFTLTISSLQPE | |
| | LGCLVKDYFPEPVTVSWNSGALTSGVHT | | DFATYYCQQANSFPFT | |
| | FPAVLQSSGLYSLSSVVTVPSSSLGTKTYT | | FGPGTKVDIKRTVAAP | |
| | CNVDHKPSNTKVDKRVSKYGPPCPSCPPE | | SVFIFPPSDEQLKSGTA | |
| | FLGGPSVFLFPPKPKDTLMISRTPEVTCVV | | SVVCLLNNFYPREAK | |
| | VDVSQEDPEVQFNWYVDGVEVHNAKTK | | VQWKVDNALQSGNS | |
| | PREEQFNSTYRVVSVLTVLHQDWLNGKE | | QESVTEQDSKDSTYSL | |
| | YKCKVSNKGLPSSIEKTISKAKQPREPQV | | SSTLTLSKADYEKHKV | |
| | YTLPPSQEEMTKNQVSLTCLVKGFYPSDI | | YACEVTHQGLSSPVT | |
| | AVEWESNGQPENNYKTTPPVLDSDGSFFL | | KSFNRGEC | |
| | YSRLTVDKSRWQEGNVFSCSVMHEALHN | | | |
| | HYTQKSLSLSLGK | | | |
| 95 | QVQLVQSGAEVKKPGASVKVSCKASGYT | 1809 | DIQMTQSPSSLSASVG | 1897 |
| | FTDYYMHWVRQAPGQGLEWMGWINPNS | | DRVTITCRASRGINNW | |
| | GGTNYAQKFQGRVTMTRDTSTSTVYMEL | | LTWYQQKPGKAPKLL | |
| | SSLRSEDTAVYYCARDSRIAVAASSFDYW | | IYGASSLQSGVPSRFS | |
| | GQGTLVTVSSSTKGPSVFPLAPCSRSTSES | | GSGSGTDFTLTISSLQP | |
| | TAALGCLVKDYFPEPVTVSWNSGALTSG | | EDFATYYCQQSYRIPY | |
| | VHTFPAVLQSSGLYSLSSVVTVPSSSLGTK | | TFGQGTKLEIKRTVAA | |
| | TYTCNVDHKPSNTKVDKRVSKYGPPCPS | | PSVFIFPPSDEQLKSGT | |
| | CPPEFLGGPSVFLFPPKPKDTLMISRTPEV | | ASVVCLLNNFYPREA | |
| | TCVVVDVSQEDPEVQFNWYVDGVEVHN | | KVQWKVDNALQSGN | |
| | AKTKPREEQFNSTYRVVSVLTVLHQDWL | | SQESVTEQDSKDSTYS | |
| | NGKEYKCKVSNKGLPSSIEKTISKAKQPR | | LSSTLTLSKADYEKHK | |
| | EPQVYTLPPSQEEMTKNQVSLTCLVKGFY | | VYACEVTHQGLSSPV | |
| | PSDIAVEWESNGQPENNYKTTPPVLDSDG | | TKSFNRGEC | |
| | SFFLYSRLTVDKSRWQEGNVFSCSVMHE | | | |
| | ALHNHYTQKSLSLSLGK | | | |
| 96 | EVQLLESGGGLVQPGGSLRLSCAASGFTF | 1810 | DIQMTQSPSSLSASVG | 1898 |
| | SSYAMSWVRQAPGKGLEWVSDISGSGSG | | DRVTITCRASQSVSSF | |
| | TYYADAVKGRFTISRDNSKNTLYLQMNS | | LNWYQQKPGKAPKLL | |
| | LRAEDTAVYYCARPGSDGEFDYWGQGT | | IYAASSLQSGVPSRFS | |
| | LVTVSSSTKGPSVFPLAPCSRSTSESTAAL | | GSGSGTDFTLTISSLQP | |
| | GCLVKDYFPEPVTVSWNSGALTSGVHTF | | EDFATYYCQQSYTTPL | |
| | PAVLQSSGLYSLSSVVTVPSSSLGTKTYTC | | TFGQGTKVEIKRTVAA | |
| | NVDHKPSNTKVDKRVSKYGPPCPSCPPEF | | PSVFIFPPSDEQLKSGT | |
| | LGGPSVFLFPPKPKDTLMISRTPEVTCVVV | | ASVVCLLNNFYPREA | |
| | DVSQEDPEVQFNWYVDGVEVHNAKTKP | | KVQWKVDNALQSGN | |
| | REEQFNSTYRVVSVLTVLHQDWLNGKEY | | SQESVTEQDSKDSTYS | |
| | KCKVSNKGLPSSIEKTISKAKQPREPQVYT | | LSSTLTLSKADYEKHK | |
| | LPPSQEEMTKNQVSLTCLVKGFYPSDIAV | | VYACEVTHQGLSSPV | |
| | EWESNGQPENNYKTTPPVLDSDGSFFLYS | | TKSFNRGEC | |
| | RLTVDKSRWQEGNVFSCSVMHEALHNH | | | |
| | YTQKSLSLSLGK | | | |
| 97 | QVQLVQSGAEVKKPGSSVKVSCKASGGT | 1811 | DIQMTQSPSSLSASVG | 1899 |
| | FSSDAINWVRQAPGQGLEWMGGFDPEDG | | DRVTITCRSSRNISHW | |
| | ETIYAQKFQGRVTITADESTSTAYMELSSL | | LAWYQQKPGKAPKLL | |
| | RSEDTAVYYCARGPSGYDFEFDYWGQGT | | IYKASSLESGVPSRFSG | |
| | LVTVSSSTKGPSVFPLAPCSRSTSESTAAL | | SGSGTDFTLTISSLQPE | |
| | GCLVKDYFPEPVTVSWNSGALTSGVHTF | | DFATYYCQQAISFPLT | |
| | PAVLQSSGLYSLSSVVTVPSSSLGTKTYTC | | FGGGTKVEIKRTVAAP | |
| | NVDHKPSNTKVDKRVSKYGPPCPSCPPEF | | SVFIFPPSDEQLKSGTA | |
| | LGGPSVFLFPPKPKDTLMISRTPEVTCVVV | | SVVCLLNNFYPREAK | |
| | DVSQEDPEVQFNWYVDGVEVHNAKTKP | | VQWKVDNALQSGNS | |
| | REEQFNSTYRVVSVLTVLHQDWLNGKEY | | QESVTEQDSKDSTYSL | |
| | KCKVSNKGLPSSIEKTISKAKQPREPQVYT | | SSTLTLSKADYEKHKV | |
| | LPPSQEEMTKNQVSLTCLVKGFYPSDIAV | | YACEVTHQGLSSPVT | |
| | EWESNGQPENNYKTTPPVLDSDGSFFLYS | | KSFNRGEC | |
| | RLTVDKSRWQEGNVFSCSVMHEALHNH | | | |
| | YTQKSLSLSLGK | | | |
| 98 | QVQLVQSGAEVKKPGASVKVSCKASGDT | 1812 | DIVMTQSPDSLAVSLG | 1900 |
| | FTTYAISWVRQAPGQGLEWMGWINPNSG | | ERATINCKSSQSVLHS | |
| | VATYANKFQGRVTMTRDTSTSTVYMELS | | SKNKNYLAWYQQKP | |
| | SLRSEDTAVYYCAREGIVGATDAFDIWG | | GQPPKLLIYWASTRES | |
| | QGTMVTVSSSTKGPSVFPLAPCSRSTSEST | | GVPDRFSGSGSGTDFT | |
| | AALGCLVKDYFPEPVTVSWNSGALTSGV | | LTISSLQAEDVAVYYC | |
| | HTFPAVLQSSGLYSLSSVVTVPSSSLGTKT | | QQYFTTPPTFGPGTKV | |
| | YTCNVDHKPSNTKVDKRVSKYGPPCPSC | | DIKRTVAAPSVFIFPPS | |
| | PPEFLGGPSVFLFPPKPKDTLMISRTPEVT | | DEQLKSGTASVVCLL | |
| | CVVVDVSQEDPEVQFNWYVDGVEVHNA | | NNFYPREAKVQWKV | |
| | KTKPREEQFNSTYRVVSVLTVLHQDWLN | | DNALQSGNSQESVTE | |
| | GKEYKCKVSNKGLPSSIEKTISKAKQPREP | | QDSKDSTYSLSSTLTL | |
| | QVYTLPPSQEEMTKNQVSLTCLVKGFYPS | | SKADYEKHKVYACEV | |
| | DIAVEWESNGQPENNYKTTPPVLDSDGSF | | THQGLSSPVTKSFNRG | |
| | FLYSRLTVDKSRWQEGNVFSCSVMHEAL | | EC | |
| | HNHYTQKSLSLSLGK | | | |
| 99 | QVQLVQSGAEVKKPGASVKVSCKASGDT | 1813 | DIQMTQSPSSLSASVG | 1901 |
| | FTNHYMHWVRQAPGQGLEWMGWINPNS | | DRVTITCRASQSLGSW | |
| | GGTNYAQKFQGRVTMTRDTSTSTVYMEL | | LAWYQQKPGKAPKLL | |
| | SSLRSEDTAVYYCARDLVPAAVGGYFDY | | IYAASSLQSGVPSRFS | |
| | WGQGTLVTVSSSTKGPSVFPLAPCSRSTS | | GSGSGTDFTLTISSLQP | |
| | ESTAALGCLVKDYFPEPVTVSWNSGALTS | | EDFATYYCQQANSFPL | |
| | GVHTFPAVLQSSGLYSLSSVVTVPSSSLGT | | TFGQGTKVEIKRTVAA | |
| | KTYTCNVDHKPSNTKVDKRVSKYGPPCP | | PSVFIFPPSDEQLKSGT | |
| | SCPPEFLGGPSVFLFPPKPKDTLMISRTPE | | ASVVCLLNNFYPREA | |
| | VTCVVVDVSQEDPEVQFNWYVDGVEVH | | KVQWKVDNALQSGN | |
| | NAKTKPREEQFNSTYRVVSVLTVLHQDW | | SQESVTEQDSKDSTYS | |
| | LNGKEYKCKVSNKGLPSSIEKTISKAKQP | | LSSTLTLSKADYEKHK | |
| | REPQVYTLPPSQEEMTKNQVSLTCLVKGF | | VYACEVTHQGLSSPV | |
| | YPSDIAVEWESNGQPENNYKTTPPVLDSD | | TKSFNRGEC | |
| | GSFFLYSRLTVDKSRWQEGNVFSCSVMH | | | |
| | EALHNHYTQKSLSLSLGK | | | |
| 100 | EVQLLESGGGLVQPGGSLRLSCAASGFTF | 1814 | DIQMTQSPSSLSASVG | 1902 |
| | SSHWMSWVRQAPGKGLEWVSAISGSGGS | | DRVTITCQASQDIDNY | |
| | TYYADSVKGRFTISRDNSKNTLYLQMNS | | LNWYQQKPGKAPKLL | |
| | LRAEDTAVYYCARDDNSGSQADWGQGT | | IYDASNLETGVPSRFS | |
| | LVTVSSSTKGPSVFPLAPCSRSTSESTAAL | | GSGSGTDFTLTISSLQP | |
| | GCLVKDYFPEPVTVSWNSGALTSGVHTF | | EDFATYYCQQSYSTPL | |
| | PAVLQSSGLYSLSSVVTVPSSSLGTKTYTC | | TFGGGTKLEIKRTVAA | |
| | NVDHKPSNTKVDKRVSKYGPPCPSCPPEF | | PSVFIFPPSDEQLKSGT | |
| | LGGPSVFLFPPKPKDTLMISRTPEVTCVVV | | ASVVCLLNNFYPREA | |
| | DVSQEDPEVQFNWYVDGVEVHNAKTKP | | KVQWKVDNALQSGN | |
| | REEQFNSTYRVVSVLTVLHQDWLNGKEY | | SQESVTEQDSKDSTYS | |
| | KCKVSNKGLPSSIEKTISKAKQPREPQVYT | | LSSTLTLSKADYEKHK | |
| | LPPSQEEMTKNQVSLTCLVKGFYPSDIAV | | VYACEVTHQGLSSPV | |
| | EWESNGQPENNYKTTPPVLDSDGSFFLYS | | TKSFNRGEC | |
| | RLTVDKSRWQEGNVFSCSVMHEALHNH | | | |
| | YTQKSLSLSLGK | | | |
| 101 | QVQLVQSGAEVKKPGASVKVSCKASGYS | 1815 | DIQMTQSPSSLSASVG | 1903 |
| | FTGYYMHWVRQAPGQGLEWMGWINPNS | | DRVTITCRASQGIRNW | |
| | GGTYFAQNFQGRVTMTRDTSTSTVYMEL | | LAWYQQKPGKAPKLL | |
| | SSLRSEDTAVYYCVKDRGDRVVTSYLDY | | IYAASSLQSGVPSRFS | |
| | WGQGTLVTVSSSTKGPSVFPLAPCSRSTS | | GSGSGTDFTLTISSLQP | |
| | ESTAALGCLVKDYFPEPVTVSWNSGALTS | | EDFATYYCQQSYRTP | |
| | GVHTFPAVLQSSGLYSLSSVVTVPSSSLGT | | YTFGQGTKLEIKRTVA | |
| | KTYTCNVDHKPSNTKVDKRVSKYGPPCP | | APSVFIFPPSDEQLKSG | |
| | SCPPEFLGGPSVFLFPPKPKDTLMISRTPE | | TASVVCLLNNFYPREA | |
| | VTCVVVDVSQEDPEVQFNWYVDGVEVH | | KVQWKVDNALQSGN | |
| | NAKTKPREEQFNSTYRVVSVLTVLHQDW | | SQESVTEQDSKDSTYS | |
| | LNGKEYKCKVSNKGLPSSIEKTISKAKQP | | LSSTLTLSKADYEKHK | |
| | REPQVYTLPPSQEEMTKNQVSLTCLVKGF | | VYACEVTHQGLSSPV | |
| | YPSDIAVEWESNGQPENNYKTTPPVLDSD | | TKSFNRGEC | |
| | GSFFLYSRLTVDKSRWQEGNVFSCSVMH | | | |
| | EALHNHYTQKSLSLSLGK | | | |
| 102 | QVQLVQSGAEVKKPGASVKVSCKASGYT | 1816 | DIVMTQSPDSLAVSLG | 1904 |
| | FTGYYMHWVRQAPGQGLEWMGIINPSG | | ERATINCKSSQSVLYS | |
| | GSTSYAQKFQGRVTMTRDTSTSTVYMEL | | SNNKNYLAWYQQKP | |
| | SSLRSEDTAVYYCARAAPYYYDSSGYYS | | GQPPKLLIYWASTRES | |
| | GGYYFDYWGQGTLVTVSSSTKGPSVFPL | | GVPDRFSGSGSGTDFT | |
| | APCSRSTSESTAALGCLVKDYFPEPVTVS | | LTISSLQAEDVAVYYC | |
| | WNSGALTSGVHTFPAVLQSSGLYSLSSVV | | QQYYTTPLTFGQGTK | |
| | TVPSSSLGTKTYTCNVDHKPSNTKVDKR | | LEIKRTVAAPSVFIFPP | |
| | VSKYGPPCPSCPPEFLGGPSVFLFPPKPKD | | SDEQLKSGTASVVCLL | |
| | TLMISRTPEVTCVVVDVSQEDPEVQFNW | | NNFYPREAKVQWKV | |
| | YVDGVEVHNAKTKPREEQFNSTYRVVSV | | DNALQSGNSQESVTE | |
| | LTVLHQDWLNGKEYKCKVSNKGLPSSIE | | QDSKDSTYSLSSTLTL | |
| | KTISKAKQPREPQVYTLPPSQEEMTKNQV | | SKADYEKHKVYACEV | |
| | SLTCLVKGFYPSDIAVEWESNGQPENNYK | | THQGLSSPVTKSFNRG | |
| | TTPPVLDSDGSFFLYSRLTVDKSRWQEGN | | EC | |
| | VFSCSVMHEALHNHYTQKSLSLSLGK | | | |
| 103 | EVQLLESGGGLVQPGGSLRLSCAASGFTF | 1817 | DIVMTQSPLSLPVTPG | 1905 |
| | SIYEIHWVRQAPGKGLEWVSAISGSGGST | | EPASISCRSSQSLLHSN | |
| | YYADSVKGRFTISRDNSKNTLYLQMNSL | | GYNYLDWYLQKPGQS | |
| | RAEDTAVYYCARSYCGGDCWDYYYYYG | | PQLLIYLASNRASGVP | |
| | MDVWGQGTTVTVSSSTKGPSVFPLAPCS | | DRFSGSGSGTDFTLKIS | |
| | RSTSESTAALGCLVKDYFPEPVTVSWNSG | | RVEAEDVGVYYCKQT | |
| | ALTSGVHTFPAVLQSSGLYSLSSVVTVPSS | | SHIPLTFGQGTK VEIKR | |
| | SLGTKTYTCNVDHKPSNTKVDKRVSKYG | | TVAAPSVFIFPPSDEQL | |
| | PPCPSCPPEFLGGPSVFLFPPKPKDTLMISR | | KSGTASVVCLLNNFYP | |
| | TPEVTCVVVDVSQEDPEVQFNWYVDGVE | | REAKVQWKVDNALQ | |
| | VHNAKTKPREEQFNSTYRVVSVLTVLHQ | | SGNSQESVTEQDSKDS | |
| | DWLNGKEYKCKVSNKGLPSSIEKTISKAK | | TYSLSSTLTLSKADYE | |
| | QPREPQVYTLPPSQEEMTKNQVSLTCLVK | | KHKVYACEVTHQGLS | |
| | GFYPSDIAVEWESNGQPENNYKTTPPVLD | | SPVTKSFNRGEC | |
| | SDGSFFLYSRLTVDKSRWQEGNVFSCSV | | | |
| | MHEALHNHYTQKSLSLSLGK | | | |
| 104 | EVQLVESGGGLVKPGGSLRLSCAASGFTF | 1818 | DIVMTQSPLSLPVTPG | 1906 |
| | SDNSMNWVRQAPGKGLEWVSYISSSGSTI | | EPASISCRSSQSLLHSN | |
| | YYADSVKGRFTISRDDSKNTLYLQMNSL | | GYNYLDWYLQKPGQS | |
| | KTEDTAVYYCARGRASSWPNWFDPWGQ | | PQLLIYSASNLQSGVP | |
| | GTLVTVSSSTKGPSVFPLAPCSRSTSESTA | | DRFSGSGSGTDFTLKIS | |
| | ALGCLVKDYFPEPVTVSWNSGALTSGVH | | RVEAEDVGVYYCMQ | |
| | TFPAVLQSSGLYSLSSVVTVPSSSLGTKTY | | ALQTPPTFGQGTKLEI | |
| | TCNVDHKPSNTKVDKRVSKYGPPCPSCPP | | KRTVAAPSVFIFPPSDE | |
| | EFLGGPSVFLFPPKPKDTLMISRTPEVTCV | | QLKSGTASVVCLLNN | |
| | VVDVSQEDPEVQFNWYVDGVEVHNAKT | | FYPREAKVQWKVDN | |
| | KPREEQFNSTYRVVSVLTVLHQDWLNGK | | ALQSGNSQESVTEQDS | |
| | EYKCKVSNKGLPSSIEKTISKAKQPREPQV | | KDSTYSLSSTLTLSKA | |
| | YTLPPSQEEMTKNQVSLTCLVKGFYPSDI | | DYEKHKVYACEVTHQ | |
| | AVEWESNGQPENNYKTTPPVLDSDGSFFL | | GLSSPVTKSFNRGEC | |
| | YSRLTVDKSRWQEGNVFSCSVMHEALHN | | | |
| | HYTQKSLSLSLGK | | | |
| 105 | EVQLLESGGGLVQPGGSLRLSCAASGFTF | 1819 | DIQMTQSPSSLSASVG | 1907 |
| | SSYAMSWVRQAPGKGLEWVSGISYDSDK | | DRVTITCRASQGISNN | |
| | IGYADAVKGRFTISRDNSKNTLYLQMNSL | | LNWYQQKPGKAPKLL | |
| | RAEDTAVYYCAREWEGFDYWGQGTLVT | | IYESSTLETGVPSRFSG | |
| | VSSSTKGPSVFPLAPCSRSTSESTAALGCL | | SGSGTDFTLTISSLQPE | |
| | VKDYFPEPVTVSWNSGALTSGVHTFPAV | | DFATYYCQQSYSAPLT | |
| | LQSSGLYSLSSVVTVPSSSLGTKTYTCNV | | FGGGTKVEIKRTVAAP | |
| | DHKPSNTKVDKRVSKYGPPCPSCPPEFLG | | SVFIFPPSDEQLKSGTA | |
| | GPSVFLFPPKPKDTLMISRTPEVTCVVVD | | SVVCLLNNFYPREAK | |
| | VSQEDPEVQFNWYVDGVEVHNAKTKPR | | VQWKVDNALQSGNS | |
| | EEQFNSTYRVVSVLTVLHQDWLNGKEYK | | QESVTEQDSKDSTYSL | |
| | CKVSNKGLPSSIEKTISKAKQPREPQVYTL | | SSTLTLSKADYEKHKV | |
| | PPSQEEMTKNQVSLTCLVKGFYPSDIAVE | | YACEVTHQGLSSPVT | |
| | WESNGQPENNYKTTPPVLDSDGSFFLYSR | | KSFNRGEC | |
| | LTVDKSRWQEGNVFSCSVMHEALHNHY | | | |
| | TQKSLSLSLGK | | | |
| 106 | QVQLVQSGAEVKKPGASVKVSCKASGYT | 1820 | DIVMTQSPLSLPVTPG | 1908 |
| | FTDHYMHWVRQAPGQGLEWMGWINPNS | | EPASISCRSSQSLLHSN | |
| | GGTNYAQKFQGRVTMTRDTSTSTVYMEL | | GYNYLDWYLQKPGQS | |
| | SSLRSEDTAVYYCAKDKFGDEGSGWYGD | | PQLLIYLGSNRASGVP | |
| | FQHWGQGTLVTVSSSTKGPSVFPLAPCSR | | DRFSGSGSGTDFTLKIS | |
| | STSESTAALGCLVKDYFPEPVTVSWNSGA | | RVEAEDVGVYYCMQ | |
| | LTSGVHTFPAVLQSSGLYSLSSVVTVPSSS | | TLRTPLTFGGGTKVEI | |
| | LGTKTYTCNVDHKPSNTKVDKRVSKYGP | | KRTVAAPSVFIFPPSDE | |
| | PCPSCPPEFLGGPSVFLFPPKPKDTLMISRT | | QLKSGTASVVCLLNN | |
| | PEVTCVVVDVSQEDPEVQFNWYVDGVE | | FYPREAKVQWKVDN | |
| | VHNAKTKPREEQFNSTYRVVSVLTVLHQ | | ALQSGNSQESVTEQDS | |
| | DWLNGKEYKCKVSNKGLPSSIEKTISKAK | | KDSTYSLSSTLTLSKA | |
| | QPREPQVYTLPPSQEEMTKNQVSLTCLVK | | DYEKHKVYACEVTHQ | |
| | GFYPSDIAVEWESNGQPENNYKTTPPVLD | | GLSSPVTKSFNRGEC | |
| | SDGSFFLYSRLTVDKSRWQEGNVFSCSV | | | |
| | MHEALHNHYTQKSLSLSLGK | | | |
| 107 | EVQLLESGGGLVQPGGSLRLSCAASGFTF | 1821 | DIQMTQSPSSLSASVG | 1909 |
| | SSYWMHWVRQAPGKGLEWVSGFSGSAR | | DRVTITCRASQNIGPW | |
| | TYYADSVKGRFTISRDNSKNTLYLQMNS | | LAWYQQKPGKAPKLL | |
| | LRAEDTAVYYCAREWSGFDYWGQGTLV | | IYDAKDLHPGVPSRFS | |
| | TVSSSTKGPSVFPLAPCSRSTSESTAALGC | | GSGSGTDFTLTISSLQP | |
| | LVKDYFPEPVTVSWNSGALTSGVHTFPA | | EDFATYYCQQANTFP | |
| | VLQSSGLYSLSSVVTVPSSSLGTKTYTCN | | MTFGQGTRLEIKRTVA | |
| | VDHKPSNTKVDKRVSKYGPPCPSCPPEFL | | APSVFIFPPSDEQLKSG | |
| | GGPSVFLFPPKPKDTLMISRTPEVTCVVV | | TASVVCLLNNFYPREA | |
| | DVSQEDPEVQFNWYVDGVEVHNAKTKP | | KVQWKVDNALQSGN | |
| | REEQFNSTYRVVSVLTVLHQDWLNGKEY | | SQESVTEQDSKDSTYS | |
| | KCKVSNKGLPSSIEKTISKAKQPREPQVYT | | LSSTLTLSKADYEKHK | |
| | LPPSQEEMTKNQVSLTCLVKGFYPSDIAV | | VYACEVTHQGLSSPV | |
| | EWESNGQPENNYKTTPPVLDSDGSFFLYS | | TKSFNRGEC | |
| | RLTVDKSRWQEGNVFSCSVMHEALHNH | | | |
| | YTQKSLSLSLGK | | | |
| 108 | QVQLVQSGAEVKKPGASVKVSCKASGY | 1822 | DIQMTQSPSSLSASVG | 1910 |
| | MFTGYYIHWVRQAPGQGLEWMGWINPN | | DRVTITCRASQSIDRW | |
| | SGGTNYAQKFQGRVTMTRDTSTSTVYME | | LAWYQQKPGKAPKLL | |
| | LSSLRSEDTAVYYCAKDRFGSGNYGYMD | | IYGASSLQSGVPSRFS | |
| | VWGKGTTVTVSSSTKGPSVFPLAPCSRST | | GSGSGTDFTLTISSLQP | |
| | SESTAALGCLVKDYFPEPVTVSWNSGALT | | EDFATYYCQQSYSTP | |
| | SGVHTFPAVLQSSGLYSLSSVVTVPSSSLG | | WTFGQGTRLEIKRTV | |
| | TKTYTCNVDHKPSNTKVDKRVSKYGPPC | | AAPSVFIFPPSDEQLKS | |
| | PSCPPEFLGGPSVFLFPPKPKDTLMISRTPE | | GTASVVCLLNNFYPRE | |
| | VTCVVVDVSQEDPEVQFNWYVDGVEVH | | AKVQWKVDNALQSG | |
| | NAKTKPREEQFNSTYRVVSVLTVLHQDW | | NSQESVTEQDSKDSTY | |
| | LNGKEYKCKVSNKGLPSSIEKTISKAKQP | | SLSSTLTLSKADYEKH | |
| | REPQVYTLPPSQEEMTKNQVSLTCLVKGF | | KVYACEVTHQGLSSP | |
| | YPSDIAVEWESNGQPENNYKTTPPVLDSD | | VTKSFNRGEC | |
| | GSFFLYSRLTVDKSRWQEGNVFSCSVMH | | | |
| | EALHNHYTQKSLSLSLGK | | | |
| 109 | EVQLLESGGGLVQPGGSLRLSCAASGFTF | 1823 | DIQMTQSPSSLSASVG | 1911 |
| | SSYAMSWVRQAPGKGLEWVSAISGSGGS | | DRVTITCQASQDISNN | |
| | TYYADSVKGRFTISRDNSKNTLYLQMNS | | LNWYQQKPGKAPKLL | |
| | LRAEDTAVYYCARELSHDYGGNSDFDY | | IYAASGLQSGVPSRFS | |
| | WGQGTLVTVSSSTKGPSVFPLAPCSRSTS | | GSGSGTDFTLTISSLQP | |
| | ESTAALGCLVKDYFPEPVTVSWNSGALTS | | EDFATYYCQQANSFPL | |
| | GVHTFPAVLQSSGLYSLSSVVTVPSSSLGT | | TFGGGTKVEIKRTVAA | |
| | KTYTCNVDHKPSNTKVDKRVSKYGPPCP | | PSVFIFPPSDEQLKSGT | |
| | SCPPEFLGGPSVFLFPPKPKDTLMISRTPE | | ASVVCLLNNFYPREA | |
| | VTCVVVDVSQEDPEVQFNWYVDGVEVH | | KVQWKVDNALQSGN | |
| | NAKTKPREEQFNSTYRVVSVLTVLHQDW | | SQESVTEQDSKDSTYS | |
| | LNGKEYKCKVSNKGLPSSIEKTISKAKQP | | LSSTLTLSKADYEKHK | |
| | REPQVYTLPPSQEEMTKNQVSLTCLVKGF | | VYACEVTHQGLSSPV | |
| | YPSDIAVEWESNGQPENNYKTTPPVLDSD | | TKSFNRGEC | |
| | GSFFLYSRLTVDKSRWQEGNVFSCSVMH | | | |
| | EALHNHYTQKSLSLSLGK | | | |
| 110 | QVQLVQSGAEVKKPGASVKVSCKASGYT | 1824 | DIQMTQSPSSLSASVG | 1912 |
| | FTDYYIHWVRQAPGQGLEWMGWINPNS | | DRVTITCRASRSIRTW | |
| | GGTNYAQEFQGRVTMTRDTSTSTVYMEL | | LAWYQQKPGKAPKLL | |
| | SSLRSEDTAVYYCARDHRIAVAGSYFDY | | IYAASSLQTGVPSRFS | |
| | WGQGTLVTVSSSTKGPSVFPLAPCSRSTS | | GSGSGTDFTLTISSLQP | |
| | ESTAALGCLVKDYFPEPVTVSWNSGALTS | | EDFATYYCQQSYSTPY | |
| | GVHTFPAVLQSSGLYSLSSVVTVPSSSLGT | | TFGQGTKLEIKRTVAA | |
| | KTYTCNVDHKPSNTKVDKRVSKYGPPCP | | PSVFIFPPSDEQLKSGT | |
| | SCPPEFLGGPSVFLFPPKPKDTLMISRTPE | | ASVVCLLNNFYPREA | |
| | VTCVVVDVSQEDPEVQFNWYVDGVEVH | | KVQWKVDNALQSGN | |
| | NAKTKPREEQFNSTYRVVSVLTVLHQDW | | SQESVTEQDSKDSTYS | |
| | LNGKEYKCKVSNKGLPSSIEKTISKAKQP | | LSSTLTLSKADYEKHK | |
| | REPQVYTLPPSQEEMTKNQVSLTCLVKGF | | VYACEVTHQGLSSPV | |
| | YPSDIAVEWESNGQPENNYKTTPPVLDSD | | TKSFNRGEC | |
| | GSFFLYSRLTVDKSRWQEGNVFSCSVMH | | | |
| | EALHNHYTQKSLSLSLGK | | | |
| 111 | QVQLVQSGAEVKKPGASVKVSCKASGYP | 1825 | DIQMTQSPSSLSASVG | 1913 |
| | FTAHYIHWVRQAPGQGLEWMGWINPNS | | DRVTITCRASQGINNW | |
| | GGTNYAQKFQGRVTMTRDTSTSTVYMEL | | LAWYQQKPGKAPKLL | |
| | SSLRSEDTAVYYCARDVEMATIGAYWYF | | IYDASNLETGVPSRFS | |
| | DLWGRGTLVTVSSSTKGPSVFPLAPCSRS | | GSGSGTDFTLTISSLQP | |
| | TSESTAALGCLVKDYFPEPVTVSWNSGAL | | EDFATYYCQQANSFPP | |
| | TSGVHTFPAVLQSSGLYSLSSVVTVPSSSL | | TFGQGTKLEIKRTVAA | |
| | GTKTYTCNVDHKPSNTKVDKRVSKYGPP | | PSVFIFPPSDEQLKSGT | |
| | CPSCPPEFLGGPSVFLFPPKPKDTLMISRTP | | ASVVCLLNNFYPREA | |
| | EVTCVVVDVSQEDPEVQFNWYVDGVEV | | KVQWKVDNALQSGN | |
| | HNAKTKPREEQFNSTYRVVSVLTVLHQD | | SQESVTEQDSKDSTYS | |
| | WLNGKEYKCKVSNKGLPSSIEKTISKAKQ | | LSSTLTLSKADYEKHK | |
| | PREPQVYTLPPSQEEMTKNQVSLTCLVKG | | VYACEVTHQGLSSPV | |
| | FYPSDIAVEWESNGQPENNYKTTPPVLDS | | TKSFNRGEC | |
| | DGSFFLYSRLTVDKSRWQEGNVFSCSVM | | | |
| | HEALHNHYTQKSLSLSLGK | | | |
| 112 | QVQLVQSGAEVKKPGSSVKVSCKASGYS | 1826 | DIVMTQSPLSLPVTPG | 1914 |
| | FTSYGISWVRQAPGQGLEWLGWISAYNG | | EPASISCRSSQSLLHSN | |
| | NTNYGQSLQGRVTITADESTSTAYMELSS | | GYNYLDWYLQKPGQS | |
| | LRSEDTAVYYCARARGAGTFFDYWGQG | | PQLLIYDATNLPTGVP | |
| | TLVTVSSSTKGPSVFPLAPCSRSTSESTAA | | DRFSGSGSGTDFTLKIS | |
| | LGCLVKDYFPEPVTVSWNSGALTSGVHT | | RVEAEDVGVYYCMQ | |
| | FPAVLQSSGLYSLSSVVTVPSSSLGTKTYT | | ALQTPFTFGQGTKLEI | |
| | CNVDHKPSNTKVDKRVSKYGPPCPSCPPE | | KRTVAAPSVFIFPPSDE | |
| | FLGGPSVFLFPPKPKDTLMISRTPEVTCVV | | QLKSGTASVVCLLNN | |
| | VDVSQEDPEVQFNWYVDGVEVHNAKTK | | FYPREAKVQWKVDN | |
| | PREEQFNSTYRVVSVLTVLHQDWLNGKE | | ALQSGNSQESVTEQDS | |
| | YKCKVSNKGLPSSIEKTISKAKQPREPQV | | KDSTYSLSSTLTLSKA | |
| | YTLPPSQEEMTKNQVSLTCLVKGFYPSDI | | DYEKHKVYACEVTHQ | |
| | AVEWESNGQPENNYKTTPPVLDSDGSFFL | | GLSSPVTKSFNRGEC | |
| | YSRLTVDKSRWQEGNVFSCSVMHEALHN | | | |
| | HYTQKSLSLSLGK | | | |
| 113 | QVQLVQSGAEVKKPGASVKVSCKASGYT | 1827 | DIQMTQSPSSLSASVG | 1915 |
| | FTGYYMHWVRQAPGQGLEWMGRINPNG | | DRVTITCRASQSINDW | |
| | GSTTYAQKFQGRVTMTRDTSTSTVYMEL | | LAWYQQKPGKAPKLL | |
| | SSLRSEDTAVYYCARDDFYYYYLDFWGK | | IYAASNLQSGVPSRFS | |
| | GTTVTVSSSTKGPSVFPLAPCSRSTSESTA | | GSGSGTDFTLTISSLQP | |
| | ALGCLVKDYFPEPVTVSWNSGALTSGVH | | EDFATYYCQQGYSTPP | |
| | TFPAVLQSSGLYSLSSVVTVPSSSLGTKTY | | TFGQGTKVEIKRTVAA | |
| | TCNVDHKPSNTKVDKRVSKYGPPCPSCPP | | PSVFIFPPSDEQLKSGT | |
| | EFLGGPSVFLFPPKPKDTLMISRTPEVTCV | | ASVVCLLNNFYPREA | |
| | VVDVSQEDPEVQFNWYVDGVEVHNAKT | | KVQWKVDNALQSGN | |
| | KPREEQFNSTYRVVSVLTVLHQDWLNGK | | SQESVTEQDSKDSTYS | |
| | EYKCKVSNKGLPSSIEKTISKAKQPREPQV | | LSSTLTLSKADYEKHK | |
| | YTLPPSQEEMTKNQVSLTCLVKGFYPSDI | | VYACEVTHQGLSSPV | |
| | AVEWESNGQPENNYKTTPPVLDSDGSFFL | | TKSFNRGEC | |
| | YSRLTVDKSRWQEGNVFSCSVMHEALHN | | | |
| | HYTQKSLSLSLGK | | | |
| 114 | QVQLVQSGAEVKKPGASVKVSCKASGYT | 1828 | DIQMTQSPSSLSASVG | 1916 |
| | FTENEMHWVRQAPGQGLEWMGWMNPN | | DRVTITCQASQDIRNY | |
| | SGNTGYAQKFQGRVTMTRDTSTSTVYME | | LNWYQQKPGKAPKLL | |
| | LSSLRSEDTAVYYCAREGGDWPYYYMD | | IYAASSLQSGVPSRFS | |
| | VWGKGTTVTVSSSTKGPSVFPLAPCSRST | | GSGSGTDFTLTISSLQP | |
| | SESTAALGCLVKDYFPEPVTVSWNSGALT | | EDFATYYCQQTSSTPL | |
| | SGVHTFPAVLQSSGLYSLSSVVTVPSSSLG | | TFGPGTKVDIKRTVAA | |
| | TKTYTCNVDHKPSNTKVDKRVSKYGPPC | | PSVFIFPPSDEQLKSGT | |
| | PSCPPEFLGGPSVFLFPPKPKDTLMISRTPE | | ASVVCLLNNFYPREA | |
| | VTCVVVDVSQEDPEVQFNWYVDGVEVH | | KVQWKVDNALQSGN | |
| | NAKTKPREEQFNSTYRVVSVLTVLHQDW | | SQESVTEQDSKDSTYS | |
| | LNGKEYKCKVSNKGLPSSIEKTISKAKQP | | LSSTLTLSKADYEKHK | |
| | REPQVYTLPPSQEEMTKNQVSLTCLVKGF | | VYACEVTHQGLSSPV | |
| | YPSDIAVEWESNGQPENNYKTTPPVLDSD | | TKSFNRGEC | |
| | GSFFLYSRLTVDKSRWQEGNVFSCSVMH | | | |
| | EALHNHYTQKSLSLSLGK | | | |
| 115 | QVQLVQSGAEVKKPGASVKVSCKASGYT | 1829 | DIQMTQSPSSLSASVG | 1917 |
| | LTGYYMHWVRQAPGQGLEWMGWMNPS | | DRVTITCRASQDIRNN | |
| | SGNTGYAQQFQGRVTMTRDTSTSTVYME | | LGWYQQKPGKAPKLL | |
| | LSSLRSEDTAVYYCARASSDRYYYDGVW | | IYGASSLQSGVPSRFS | |
| | YFDLWGRGTLVTVSSSTKGPSVFPLAPCS | | GSGSGTDFTLTISSLQP | |
| | RSTSESTAALGCLVKDYFPEPVTVSWNSG | | EDFATYYCQQTYSSPP | |
| | ALTSGVHTFPAVLQSSGLYSLSSVVTVPSS | | TFGQGTKLEIKRTVAA | |
| | SLGTKTYTCNVDHKPSNTKVDKRVSKYG | | PSVFIFPPSDEQLKSGT | |
| | PPCPSCPPEFLGGPSVFLFPPKPKDTLMISR | | ASVVCLLNNFYPREA | |
| | TPEVTCVVVDVSQEDPEVQFNWYVDGVE | | KVQWKVDNALQSGN | |
| | VHNAKTKPREEQFNSTYRVVSVLTVLHQ | | SQESVTEQDSKDSTYS | |
| | DWLNGKEYKCKVSNKGLPSSIEKTISKAK | | LSSTLTLSKADYEKHK | |
| | QPREPQVYTLPPSQEEMTKNQVSLTCLVK | | VYACEVTHQGLSSPV | |
| | GFYPSDIAVEWESNGQPENNYKTTPPVLD | | TKSFNRGEC | |
| | SDGSFFLYSRLTVDKSRWQEGNVFSCSV | | | |
| | MHEALHNHYTQKSLSLSLGK | | | |
| 116 | EVQLLESGGGLVQPGGSLRLSCAASGFTF | 1830 | DIQMTQSPSSLSASVG | 1918 |
| | STYAMHWVRQAPGKGLEWVSAISGSGGS | | DRVTITCRASQGIDNY | |
| | TYYADSVKGRFTISRDNSKNTLYLQMNS | | LAWYQQKPGKAPKLL | |
| | LRAEDTAVYYCARDGYGDYPFDYWGQG | | IYQASTLESGVPSRFSG | |
| | TLVTVSSSTKGPSVFPLAPCSRSTSESTAA | | SGSGTDFTLTISSLQPE | |
| | LGCLVKDYFPEPVTVSWNSGALTSGVHT | | DFATYYCQQSYSIPWT | |
| | FPAVLQSSGLYSLSSVVTVPSSSLGTKTYT | | FGQGTKVEIKRTVAAP | |
| | CNVDHKPSNTKVDKRVSKYGPPCPSCPPE | | SVFIFPPSDEQLKSGTA | |
| | FLGGPSVFLFPPKPKDTLMISRTPEVTCVV | | SVVCLLNNFYPREAK | |
| | VDVSQEDPEVQFNWYVDGVEVHNAKTK | | VQWKVDNALQSGNS | |
| | PREEQFNSTYRVVSVLTVLHQDWLNGKE | | QESVTEQDSKDSTYSL | |
| | YKCKVSNKGLPSSIEKTISKAKQPREPQV | | SSTLTLSKADYEKHKV | |
| | YTLPPSQEEMTKNQVSLTCLVKGFYPSDI | | YACEVTHQGLSSPVT | |
| | AVEWESNGQPENNYKTTPPVLDSDGSFFL | | KSFNRGEC | |
| | YSRLTVDKSRWQEGNVFSCSVMHEALHN | | | |
| | HYTQKSLSLSLGK | | | |
| 117 | QVQLVQSGAEVKKPGASVKVSCKASGYT | 1831 | DIQMTQSPSSLSASVG | 1919 |
| | FTGYYLHWVRQAPGQGLEWMGVINVRR | | DRVTITCRASQSISRW | |
| | GSTRYAQNFQGRVTMTRDTSTSTVYMEL | | LAWYQQKPGKAPKLL | |
| | SSLRSEDTAVYYCARVSGSYYQPWGQGT | | IYDASNLETGVPSRFS | |
| | LVTVSSSTKGPSVFPLAPCSRSTSESTAAL | | GSGSGTDFTLTISSLQP | |
| | GCLVKDYFPEPVTVSWNSGALTSGVHTF | | EDFATYYCQQGNSFPP | |
| | PAVLQSSGLYSLSSVVTVPSSSLGTKTYTC | | IFGGGTKVEIKRTVAA | |
| | NVDHKPSNTKVDKRVSKYGPPCPSCPPEF | | PSVFIFPPSDEQLKSGT | |
| | LGGPSVFLFPPKPKDTLMISRTPEVTCVVV | | ASVVCLLNNFYPREA | |
| | DVSQEDPEVQFNWYVDGVEVHNAKTKP | | KVQWKVDNALQSGN | |
| | REEQFNSTYRVVSVLTVLHQDWLNGKEY | | SQESVTEQDSKDSTYS | |
| | KCKVSNKGLPSSIEKTISKAKQPREPQVYT | | LSSTLTLSKADYEKHK | |
| | LPPSQEEMTKNQVSLTCLVKGFYPSDIAV | | VYACEVTHQGLSSPV | |
| | EWESNGQPENNYKTTPPVLDSDGSFFLYS | | TKSFNRGEC | |
| | RLTVDKSRWQEGNVFSCSVMHEALHNH | | | |
| | YTQKSLSLSLGK | | | |
| 118 | QVQLVQSGAEVKKPGASVKVSCKASGYT | 1832 | DIQMTQSPSSLSASVG | 1920 |
| | FSNYYMHWVRQAPGQGLEWMGWMNPD | | DRVTITCRASQSISSW | |
| | SGTTGYAQKFQGRVTMTRDTSTSTVYME | | LAWYQQKPGKAPKLL | |
| | LSSLRSEDTAVYYCVRDGTMVQGIFDYW | | IYGASSLQSGVPSRFS | |
| | GQGTLVTVSSSTKGPSVFPLAPCSRSTSES | | GSGSGTDFTLTISSLQP | |
| | TAALGCLVKDYFPEPVTVSWNSGALTSG | | EDFATYYCQQTYRTP | |
| | VHTFPAVLQSSGLYSLSSVVTVPSSSLGTK | | LTFGPGTKVDIKRTVA | |
| | TYTCNVDHKPSNTKVDKRVSKYGPPCPS | | APSVFIFPPSDEQLKSG | |
| | CPPEFLGGPSVFLFPPKPKDTLMISRTPEV | | TASVVCLLNNFYPREA | |
| | TCVVVDVSQEDPEVQFNWYVDGVEVHN | | KVQWKVDNALQSGN | |
| | AKTKPREEQFNSTYRVVSVLTVLHQDWL | | SQESVTEQDSKDSTYS | |
| | NGKEYKCKVSNKGLPSSIEKTISKAKQPR | | LSSTLTLSKADYEKHK | |
| | EPQVYTLPPSQEEMTKNQVSLTCLVKGFY | | VYACEVTHQGLSSPV | |
| | PSDIAVEWESNGQPENNYKTTPPVLDSDG | | TKSFNRGEC | |
| | SFFLYSRLTVDKSRWQEGNVFSCSVMHE | | | |
| | ALHNHYTQKSLSLSLGK | | | |
| 119 | QVQLVQSGAEVKKPGSSVKVSCKASGGT | 1833 | DIQMTQSPSSLSASVG | 1921 |
| | FSTYAITWVRQAPGQGLEWMGGIIPIVGR | | DRVTITCRASQGIGND | |
| | ANYAQKFQGRVTITADESTSTAYMELSSL | | LGWYQQKPGKAPKLL | |
| | RSEDTAVYYCARSGGHDLDYWGQGTLV | | IYGASSVQSGVPSRFS | |
| | TVSSSTKGPSVFPLAPCSRSTSESTAALGC | | GSGSGTDFTLTISSLQP | |
| | LVKDYFPEPVTVSWNSGALTSGVHTFPA | | EDFATYYCQQSYSTPI | |
| | VLQSSGLYSLSSVVTVPSSSLGTKTYTCN | | TFGQGTRLEIKRTVAA | |
| | VDHKPSNTKVDKRVSKYGPPCPSCPPEFL | | PSVFIFPPSDEQLKSGT | |
| | GGPSVFLFPPKPKDTLMISRTPEVTCVVV | | ASVVCLLNNFYPREA | |
| | DVSQEDPEVQFNWYVDGVEVHNAKTKP | | KVQWKVDNALQSGN | |
| | REEQFNSTYRVVSVLTVLHQDWLNGKEY | | SQESVTEQDSKDSTYS | |
| | KCKVSNKGLPSSIEKTISKAKQPREPQVYT | | LSSTLTLSKADYEKHK | |
| | LPPSQEEMTKNQVSLTCLVKGFYPSDIAV | | VYACEVTHQGLSSPV | |
| | EWESNGQPENNYKTTPPVLDSDGSFFLYS | | TKSFNRGEC | |
| | RLTVDKSRWQEGNVFSCSVMHEALHNH | | | |
| | YTQKSLSLSLGK | | | |
| 120 | EVQLLESGGGLVQPGGSLRLSCAASGFTF | 1834 | EIVMTQSPATLSVSPG | 1922 |
| | SSYGMHWVRQAPGKGLEWVSSISGSGDT | | ERATLSCRASQSVSSS | |
| | TYYADSVKGRFTISRDNSKNTLYLQMNS | | YLAWYQQKPGQAPRL | |
| | LRAEDTAVYYCARDNPYGDYGGSFDYW | | LIYATSTRATGIPARFS | |
| | GQGTLVTVSSSTKGPSVFPLAPCSRSTSES | | GSGSGTEFTLTISSLQS | |
| | TAALGCLVKDYFPEPVTVSWNSGALTSG | | EDFAVYYCQQYGSLP | |
| | VHTFPAVLQSSGLYSLSSVVTVPSSSLGTK | | LTFGQGTKVEIKRTVA | |
| | TYTCNVDHKPSNTKVDKRVSKYGPPCPS | | APSVFIFPPSDEQLKSG | |
| | CPPEFLGGPSVFLFPPKPKDTLMISRTPEV | | TASVVCLLNNFYPREA | |
| | TCVVVDVSQEDPEVQFNWYVDGVEVHN | | KVQWKVDNALQSGN | |
| | AKTKPREEQFNSTYRVVSVLTVLHQDWL | | SQESVTEQDSKDSTYS | |
| | NGKEYKCKVSNKGLPSSIEKTISKAKQPR | | LSSTLTLSKADYEKHK | |
| | EPQVYTLPPSQEEMTKNQVSLTCLVKGFY | | VYACEVTHQGLSSPV | |
| | PSDIAVEWESNGQPENNYKTTPPVLDSDG | | TKSFNRGEC | |
| | SFFLYSRLTVDKSRWQEGNVFSCSVMHE | | | |
| | ALHNHYTQKSLSLSLGK | | | |
| 121 | QVQLVQSGAEVKKPGASVKVSCKASGYT | 1835 | DIQMTQSPSSLSASVG | 1923 |
| | FTSYYMHWVRQAPGQGLEWMGIIDPSGG | | DRVTITCRASQGISNN | |
| | STNYAQKFQGRVTMTRDTSTSTVYMELS | | LNWYQQKPGKAPKLL | |
| | SLRSEDTAVYYCARDYYGSGSYYGLDY | | IYDASNLETGVPSRFS | |
| | WGRGTLVTVSSSTKGPSVFPLAPCSRSTS | | GSGSGTDFTLTISSLQP | |
| | ESTAALGCLVKDYFPEPVTVSWNSGALTS | | EDFATYYCQQANSFPL | |
| | GVHTFPAVLQSSGLYSLSSVVTVPSSSLGT | | TFGPGTKVDIKRTVAA | |
| | KTYTCNVDHKPSNTKVDKRVSKYGPPCP | | PSVFIFPPSDEQLKSGT | |
| | SCPPEFLGGPSVFLFPPKPKDTLMISRTPE | | ASVVCLLNNFYPREA | |
| | VTCVVVDVSQEDPEVQFNWYVDGVEVH | | KVQWKVDNALQSGN | |
| | NAKTKPREEQFNSTYRVVSVLTVLHQDW | | SQESVTEQDSKDSTYS | |
| | LNGKEYKCKVSNKGLPSSIEKTISKAKQP | | LSSTLTLSKADYEKHK | |
| | REPQVYTLPPSQEEMTKNQVSLTCLVKGF | | VYACEVTHQGLSSPV | |
| | YPSDIAVEWESNGQPENNYKTTPPVLDSD | | TKSFNRGEC | |
| | GSFFLYSRLTVDKSRWQEGNVFSCSVMH | | | |
| | EALHNHYTQKSLSLSLGK | | | |
| 122 | QVQLVQSGAEVKKPGASVKVSCKASGYT | 1836 | DIQMTQSPSSLSASVG | 1924 |
| | FTDYYMHWVRQAPGQGLEWMGIINPSG | | DRVTITCRASQGIRND | |
| | GSTRYAQKFQGRVTMTRDTSTSTVYMEL | | LAWYQQKPGKAPKLL | |
| | SSLRSEDTAVYYCARVDGRRWLQSDYW | | IYAASTLQNGVPSRFS | |
| | GQGTLVTVSSSTKGPSVFPLAPCSRSTSES | | GSGSGTDFTLTISSLQP | |
| | TAALGCLVKDYFPEPVTVSWNSGALTSG | | EDFATYYCQQSYSTP | |
| | VHTFPAVLQSSGLYSLSSVVTVPSSSLGTK | | WTFGQGTKVEIKRTV | |
| | TYTCNVDHKPSNTKVDKRVSKYGPPCPS | | AAPSVFIFPPSDEQLKS | |
| | CPPEFLGGPSVFLFPPKPKDTLMISRTPEV | | GTASVVCLLNNFYPRE | |
| | TCVVVDVSQEDPEVQFNWYVDGVEVHN | | AKVQWKVDNALQSG | |
| | AKTKPREEQFNSTYRVVSVLTVLHQDWL | | NSQESVTEQDSKDSTY | |
| | NGKEYKCKVSNKGLPSSIEKTISKAKQPR | | SLSSTLTLSKADYEKH | |
| | EPQVYTLPPSQEEMTKNQVSLTCLVKGFY | | KVYACEVTHQGLSSP | |
| | PSDIAVEWESNGQPENNYKTTPPVLDSDG | | VTKSFNRGEC | |
| | SFFLYSRLTVDKSRWQEGNVFSCSVMHE | | | |
| | ALHNHYTQKSLSLSLGK | | | |
| 123 | QVQLVQSGAEVKKPGASVKVSCKASGYT | 1837 | DIQMTQSPSSLSASVG | 1925 |
| | FTDYYMHWVRQAPGQGLEWMGIINPSG | | DRVTITCRASQGIRND | |
| | GSTRYAQKFQGRVTMTRDTSTSTVYMEL | | LAWYQQKPGKAPKLL | |
| | SSLRSEDTAVYYCARVDGRRWLRSDYW | | IYAASTLQNGVPSRFS | |
| | GQGTLVTVSSSTKGPSVFPLAPCSRSTSES | | GSGSGTDFTLTISSLQP | |
| | TAALGCLVKDYFPEPVTVSWNSGALTSG | | EDFATYYCQQSYSTP | |
| | VHTFPAVLQSSGLYSLSSVVTVPSSSLGTK | | WTFGQGTKVEIKRTV | |
| | TYTCNVDHKPSNTKVDKRVSKYGPPCPS | | AAPSVFIFPPSDEQLKS | |
| | CPPEFLGGPSVFLFPPKPKDTLMISRTPEV | | GTASVVCLLNNFYPRE | |
| | TCVVVDVSQEDPEVQFNWYVDGVEVHN | | AKVQWKVDNALQSG | |
| | AKTKPREEQFNSTYRVVSVLTVLHQDWL | | NSQESVTEQDSKDSTY | |
| | NGKEYKCKVSNKGLPSSIEKTISKAKQPR | | SLSSTLTLSKADYEKH | |
| | EPQVYTLPPSQEEMTKNQVSLTCLVKGFY | | KVYACEVTHQGLSSP | |
| | PSDIAVEWESNGQPENNYKTTPPVLDSDG | | VTKSFNRGEC | |
| | SFFLYSRLTVDKSRWQEGNVFSCSVMHE | | | |
| | ALHNHYTQKSLSLSLGK | | | |
| 124 | QVQLVQSGAEVKKPGASVKVSCKASGGT | 1838 | DIQMTQSPSSLSASVG | 1926 |
| | FSSYAISWVRQAPGQGLEWLGIISPSGRSA | | DRVTITCQASQGINNY | |
| | GYGRKFQGRVTMTRDTSTSTVYMELSSL | | LNWYQQKPGKAPKLL | |
| | RSEDTAVYYCARTDYGGHKWYFDLWGR | | IYAASTLQRGVPSRFS | |
| | GTLVTVSSSTKGPSVFPLAPCSRSTSESTA | | GSGSGTDFTLTISSLQP | |
| | ALGCLVKDYFPEPVTVSWNSGALTSGVH | | EDFATYYCQQSYQTP | |
| | TFPAVLQSSGLYSLSSVVTVPSSSLGTKTY | | LTFGGGTKVEIKRTVA | |
| | TCNVDHKPSNTKVDKRVSKYGPPCPSCPP | | APSVFIFPPSDEQLKSG | |
| | EFLGGPSVFLFPPKPKDTLMISRTPEVTCV | | TASVVCLLNNFYPREA | |
| | VVDVSQEDPEVQFNWYVDGVEVHNAKT | | KVQWKVDNALQSGN | |
| | KPREEQFNSTYRVVSVLTVLHQDWLNGK | | SQESVTEQDSKDSTYS | |
| | EYKCKVSNKGLPSSIEKTISKAKQPREPQV | | LSSTLTLSKADYEKHK | |
| | YTLPPSQEEMTKNQVSLTCLVKGFYPSDI | | VYACEVTHQGLSSPV | |
| | AVEWESNGQPENNYKTTPPVLDSDGSFFL | | TKSFNRGEC | |
| | YSRLTVDKSRWQEGNVFSCSVMHEALHN | | | |
| | HYTQKSLSLSLGK | | | |
| 125 | QVQLVQSGAEVKKPGASVKVSCKASGYT | 1839 | DIQMTQSPSSLSASVG | 1927 |
| | FTGYYLHWVRQAPGQGLEWMGVISPSG | | DRVTITCRASQSISSYL | |
| | GGTSYAQKFQGRVTMTRDTSTSTVYMEL | | NWYQQKPGKAPKLLI | |
| | SSLRSEDTAVYYCARAGFGEGVFRHWGQ | | YAASSLQSGVPSRFSG | |
| | GTLVTVSSSTKGPSVFPLAPCSRSTSESTA | | SGSGTDFTLTISSLQPE | |
| | ALGCLVKDYFPEPVTVSWNSGALTSGVH | | DFATYYCQQSYSTPLT | |
| | TFPAVLQSSGLYSLSSVVTVPSSSLGTKTY | | FGGGTKVEIKRTVAAP | |
| | TCNVDHKPSNTKVDKRVSKYGPPCPSCPP | | SVFIFPPSDEQLKSGTA | |
| | EFLGGPSVFLFPPKPKDTLMISRTPEVTCV | | SVVCLLNNFYPREAK | |
| | VVDVSQEDPEVQFNWYVDGVEVHNAKT | | VQWKVDNALQSGNS | |
| | KPREEQFNSTYRVVSVLTVLHQDWLNGK | | QESVTEQDSKDSTYSL | |
| | EYKCKVSNKGLPSSIEKTISKAKQPREPQV | | SSTLTLSKADYEKHKV | |
| | YTLPPSQEEMTKNQVSLTCLVKGFYPSDI | | YACEVTHQGLSSPVT | |
| | AVEWESNGQPENNYKTTPPVLDSDGSFFL | | KSFNRGEC | |
| | YSRLTVDKSRWQEGNVFSCSVMHEALHN | | | |
| | HYTQKSLSLSLGK | | | |
| 126 | QVQLVQSGAEVKKPGASVKVSCKASGYS | 1840 | DIQMTQSPSSLSASVG | 1928 |
| | FTSHAISWVRQAPGQGLEWMGWIKPNSG | | DRVTITCRASQGISNY | |
| | DTKYAQKFQGRVTMTRDTSTSTVYMELS | | LAWYQQKPGKAPKLL | |
| | SLRSEDTAVYYCARGSDDYYGSYYFDY | | IYTASTLQSGVPSRFSG | |
| | WGQGTLVTVSSSTKGPSVFPLAPCSRSTS | | SGSGTDFTLTISSLQPE | |
| | ESTAALGCLVKDYFPEPVTVSWNSGALTS | | DFATYYCQQSYSTPLT | |
| | GVHTFPAVLQSSGLYSLSSVVTVPSSSLGT | | FGGGTKVEIKRTVAAP | |
| | KTYTCNVDHKPSNTKVDKRVSKYGPPCP | | SVFIFPPSDEQLKSGTA | |
| | SCPPEFLGGPSVFLFPPKPKDTLMISRTPE | | SVVCLLNNFYPREAK | |
| | VTCVVVDVSQEDPEVQFNWYVDGVEVH | | VQWKVDNALQSGNS | |
| | NAKTKPREEQFNSTYRVVSVLTVLHQDW | | QESVTEQDSKDSTYSL | |
| | LNGKEYKCKVSNKGLPSSIEKTISKAKQP | | SSTLTLSKADYEKHKV | |
| | REPQVYTLPPSQEEMTKNQVSLTCLVKGF | | YACEVTHQGLSSPVT | |
| | YPSDIAVEWESNGQPENNYKTTPPVLDSD | | KSFNRGEC | |
| | GSFFLYSRLTVDKSRWQEGNVFSCSVMH | | | |
| | EALHNHYTQKSLSLSLGK | | | |
| 127 | EVQLLESGGGLVQPGGSLRLSCAASGFTF | 1841 | DIQMTQSPSSLSASVG | 1929 |
| | RNYGMGWVRQAPGKGLEWVSAISGSGG | | DRVTITCRASQGISND | |
| | STYYADSVKGRFTISRDNSKNTLYLQMNS | | LAWYQQKPGKAPKLL | |
| | LRAEDTAVYYCARVKFYGMDVWGQGTT | | IYGASNLETGVPSRFS | |
| | VTVSSSTKGPSVFPLAPCSRSTSESTAALG | | GSGSGTDFTLTISSLQP | |
| | CLVKDYFPEPVTVSWNSGALTSGVHTFP | | EDFATYYCQQANSFPF | |
| | AVLQSSGLYSLSSVVTVPSSSLGTKTYTC | | TFGPGTKVDIKRTVAA | |
| | NVDHKPSNTKVDKRVSKYGPPCPSCPPEF | | PSVFIFPPSDEQLKSGT | |
| | LGGPSVFLFPPKPKDTLMISRTPEVTCVVV | | ASVVCLLNNFYPREA | |
| | DVSQEDPEVQFNWYVDGVEVHNAKTKP | | KVQWKVDNALQSGN | |
| | REEQFNSTYRVVSVLTVLHQDWLNGKEY | | SQESVTEQDSKDSTYS | |
| | KCKVSNKGLPSSIEKTISKAKQPREPQVYT | | LSSTLTLSKADYEKHK | |
| | LPPSQEEMTKNQVSLTCLVKGFYPSDIAV | | VYACEVTHQGLSSPV | |
| | EWESNGQPENNYKTTPPVLDSDGSFFLYS | | TKSFNRGEC | |
| | RLTVDKSRWQEGNVFSCSVMHEALHNH | | | |
| | YTQKSLSLSLGK | | | |
| 128 | QVQLVQSGAEVKKPGASVKVSCKASGYT | 1842 | DIQMTQSPSSLSASVG | 1930 |
| | FTDYHMHWVRQAPGQGLEWMGWMSPN | | DRVTITCRVSQGISSYL | |
| | SGNTGYAQNFQGRVTMTRDTSTSTVYME | | NWYQQKPGKAPKLLI | |
| | LSSLRSEDTAVYYCARADYYGSDYVKFD | | YEASTLESGVPSRFSG | |
| | YWGQGTLVTVSSSTKGPSVFPLAPCSRST | | SGSGTDFTLTISSLQPE | |
| | SESTAALGCLVKDYFPEPVTVSWNSGALT | | DFATYYCQQGYSTPPT | |
| | SGVHTFPAVLQSSGLYSLSSVVTVPSSSLG | | FGQGTKVEIKRTVAAP | |
| | TKTYTCNVDHKPSNTKVDKRVSKYGPPC | | SVFIFPPSDEQLKSGTA | |
| | PSCPPEFLGGPSVFLFPPKPKDTLMISRTPE | | SVVCLLNNFYPREAK | |
| | VTCVVVDVSQEDPEVQFNWYVDGVEVH | | VQWKVDNALQSGNS | |
| | NAKTKPREEQFNSTYRVVSVLTVLHQDW | | QESVTEQDSKDSTYSL | |
| | LNGKEYKCKVSNKGLPSSIEKTISKAKQP | | SSTLTLSKADYEKHKV | |
| | REPQVYTLPPSQEEMTKNQVSLTCLVKGF | | YACEVTHQGLSSPVT | |
| | YPSDIAVEWESNGQPENNYKTTPPVLDSD | | KSFNRGEC | |
| | GSFFLYSRLTVDKSRWQEGNVFSCSVMH | | | |
| | EALHNHYTQKSLSLSLGK | | | |
| 129 | QVQLVQSGAEVKKPGASVKVSCKASGYT | 1843 | DIVMTQSPLSLPVTPG | 1931 |
| | FPNYGISWVRQAPGQGLEWMGWINPNSG | | EPASISCRSSQSLLQSN | |
| | GTKYAQRFQGRVTMTRDTSTSTVYMELS | | GYNYLDWYLQKPGQS | |
| | SLRSEDTAVYYCARDRDILTGYYHFDYW | | PQLLIYLGSNRASGVP | |
| | GQGTLVTVSSSTKGPSVFPLAPCSRSTSES | | DRFSGSGSGTDFTLKIS | |
| | TAALGCLVKDYFPEPVTVSWNSGALTSG | | RVEAEDVGVYYCMQS | |
| | VHTFPAVLQSSGLYSLSSVVTVPSSSLGTK | | THWPLTFGQGTRLEIK | |
| | TYTCNVDHKPSNTKVDKRVSKYGPPCPS | | RTVAAPSVFIFPPSDEQ | |
| | CPPEFLGGPSVFLFPPKPKDTLMISRTPEV | | LKSGTASVVCLLNNF | |
| | TCVVVDVSQEDPEVQFNWYVDGVEVHN | | YPREAKVQWKVDNA | |
| | AKTKPREEQFNSTYRVVSVLTVLHQDWL | | LQSGNSQESVTEQDSK | |
| | NGKEYKCKVSNKGLPSSIEKTISKAKQPR | | DSTYSLSSTLTLSKAD | |
| | EPQVYTLPPSQEEMTKNQVSLTCLVKGFY | | YEKHKVYACEVTHQG | |
| | PSDIAVEWESNGQPENNYKTTPPVLDSDG | | LSSPVTKSFNRGEC | |
| | SFFLYSRLTVDKSRWQEGNVFSCSVMHE | | | |
| | ALHNHYTQKSLSLSLGK | | | |
| 130 | QVQLVQSGAEVKKPGASVKVSCKASGYT | 1844 | DIQMTQSPSSLSASVG | 1932 |
| | FTDYFMHWVRQAPGQGLEWMGWINPNS | | DRVTITCRASQGISNN | |
| | GNTGYAQKFQGRVTMTRDTSTSTVYMEL | | LNWYQQKPGKAPKLL | |
| | SSLRSEDTAVYYCARLNDYGDYGGPATL | | IYAASSLQSGVPSRFS | |
| | DYWGQGTLVTVSSSTKGPSVFPLAPCSRS | | GSGSGTDFTLTISSLQP | |
| | TSESTAALGCLVKDYFPEPVTVSWNSGAL | | EDFATYYCQQSYSTPP | |
| | TSGVHTFPAVLQSSGLYSLSSVVTVPSSSL | | TFGQGTKLEIKRTVAA | |
| | GTKTYTCNVDHKPSNTKVDKRVSKYGPP | | PSVFIFPPSDEQLKSGT | |
| | CPSCPPEFLGGPSVFLFPPKPKDTLMISRTP | | ASVVCLLNNFYPREA | |
| | EVTCVVVDVSQEDPEVQFNWYVDGVEV | | KVQWKVDNALQSGN | |
| | HNAKTKPREEQFNSTYRVVSVLTVLHQD | | SQESVTEQDSKDSTYS | |
| | WLNGKEYKCKVSNKGLPSSIEKTISKAKQ | | LSSTLTLSKADYEKHK | |
| | PREPQVYTLPPSQEEMTKNQVSLTCLVKG | | VYACEVTHQGLSSPV | |
| | FYPSDIAVEWESNGQPENNYKTTPPVLDS | | TKSFNRGEC | |
| | DGSFFLYSRLTVDKSRWQEGNVFSCSVM | | | |
| | HEALHNHYTQKSLSLSLGK | | | |
| 131 | QVQLVQSGAEVKKPGASVKVSCKASGYT | 1845 | DIQMTQSPSSLSASVG | 1933 |
| | FTNYYMHWVRQAPGQGLEWLGWISPYS | | DRVTITCRASQSISTYL | |
| | GDTKYAQTLQGRVTMTRDTSTSTVYMEL | | NWYQQKPGKAPKLLI | |
| | SSLRSEDTAVYYCARESMDRLDYWGQGT | | YDASNLETGVPSRFSG | |
| | LVTVSSSTKGPSVFPLAPCSRSTSESTAAL | | SGSGTDFTLTISSLQPE | |
| | GCLVKDYFPEPVTVSWNSGALTSGVHTF | | DFATYYCQQSYSTPVL | |
| | PAVLQSSGLYSLSSVVTVPSSSLGTKTYTC | | TFGGGTKVEIKRTVAA | |
| | NVDHKPSNTKVDKRVSKYGPPCPSCPPEF | | PSVFIFPPSDEQLKSGT | |
| | LGGPSVFLFPPKPKDTLMISRTPEVTCVVV | | ASVVCLLNNFYPREA | |
| | DVSQEDPEVQFNWYVDGVEVHNAKTKP | | KVQWKVDNALQSGN | |
| | REEQFNSTYRVVSVLTVLHQDWLNGKEY | | SQESVTEQDSKDSTYS | |
| | KCKVSNKGLPSSIEKTISKAKQPREPQVYT | | LSSTLTLSKADYEKHK | |
| | LPPSQEEMTKNQVSLTCLVKGFYPSDIAV | | VYACEVTHQGLSSPV | |
| | EWESNGQPENNYKTTPPVLDSDGSFFLYS | | TKSFNRGEC | |
| | RLTVDKSRWQEGNVFSCSVMHEALHNH | | | |
| | YTQKSLSLSLGK | | | |
| 132 | EVQLLESGGGLVQPGGSLRLSCAASGFTF | 1846 | DIVMTQSPLSLPVTPG | 1934 |
| | SSYAMHWVRQAPGKGLEWVADISGSGG | | EPASISCRSSQSLLHSN | |
| | LTYYADSVKGRFTISRDNSKNTLYLQMN | | GYNYLDWYLQKPGQS | |
| | SLRAEDTAVYYCAREGDQYSSSSFFDYW | | PQLLIYLGSNRASGVP | |
| | GQGTLVTVSSSTKGPSVFPLAPCSRSTSES | | DRFSGSGSGTDFTLKIS | |
| | TAALGCLVKDYFPEPVTVSWNSGALTSG | | RVEAEDVGVYYCMQ | |
| | VHTFPAVLQSSGLYSLSSVVTVPSSSLGTK | | ALQPPPTFGQGTRLEI | |
| | TYTCNVDHKPSNTKVDKRVSKYGPPCPS | | KRTVAAPSVFIFPPSDE | |
| | CPPEFLGGPSVFLFPPKPKDTLMISRTPEV | | QLKSGTASVVCLLNN | |
| | TCVVVDVSQEDPEVQFNWYVDGVEVHN | | FYPREAKVQWKVDN | |
| | AKTKPREEQFNSTYRVVSVLTVLHQDWL | | ALQSGNSQESVTEQDS | |
| | NGKEYKCKVSNKGLPSSIEKTISKAKQPR | | KDSTYSLSSTLTLSKA | |
| | EPQVYTLPPSQEEMTKNQVSLTCLVKGFY | | DYEKHKVYACEVTHQ | |
| | PSDIAVEWESNGQPENNYKTTPPVLDSDG | | GLSSPVTKSFNRGEC | |
| | SFFLYSRLTVDKSRWQEGNVFSCSVMHE | | | |
| | ALHNHYTQKSLSLSLGK | | | |
| 133 | EVQLVESGGGLVKPGGSLRLSCAASGFTF | 1847 | DIQMTQSPSSLSASVG | 1935 |
| | DEFGMNWVRQAPGKGLEWISYISGDSGY | | DRVTITCQASQDIDIYL | |
| | TNCADSVKGRFTISRDDSKNTLYLQMNSL | | NWYQQKPGKAPKLLI | |
| | KTEDTAVYYCAAGYGGYYFDYWGQGTL | | YAASTLESGVPSRFSG | |
| | VTVSSSTKGPSVFPLAPCSRSTSESTAALG | | SGSGTDFTLTISSLQPE | |
| | CLVKDYFPEPVTVSWNSGALTSGVHTFP | | DFATYYCQQSYSTPPT | |
| | AVLQSSGLYSLSSVVTVPSSSLGTKTYTC | | FGGGTKVEIKRTVAAP | |
| | NVDHKPSNTKVDKRVSKYGPPCPSCPPEF | | SVFIFPPSDEQLKSGTA | |
| | LGGPSVFLFPPKPKDTLMISRTPEVTCVVV | | SVVCLLNNFYPREAK | |
| | DVSQEDPEVQFNWYVDGVEVHNAKTKP | | VQWKVDNALQSGNS | |
| | REEQFNSTYRVVSVLTVLHQDWLNGKEY | | QESVTEQDSKDSTYSL | |
| | KCKVSNKGLPSSIEKTISKAKQPREPQVYT | | SSTLTLSKADYEKHKV | |
| | LPPSQEEMTKNQVSLTCLVKGFYPSDIAV | | YACEVTHQGLSSPVT | |
| | EWESNGQPENNYKTTPPVLDSDGSFFLYS | | KSFNRGEC | |
| | RLTVDKSRWQEGNVFSCSVMHEALHNH | | | |
| | YTQKSLSLSLGK | | | |
| 134 | QVQLVQSGAEVKKPGASVKVSCKASGYT | 1848 | DIQMTQSPSSLSASVG | 1936 |
| | FTSYYMHWVRQAPGQGLEWMGMINPSA | | DRVTITCRASQSISTYL | |
| | GSTSYAQKFQGRVTMTRDTSTSTVYMEL | | NWYQQKPGKAPKLLI | |
| | SSLRSEDTAVYYCASVDSSGWYAPFDYW | | YDASNLETGVPSRFSG | |
| | GQGTLVTVSSSTKGPSVFPLAPCSRSTSES | | SGSGTDFTLTISSLQPE | |
| | TAALGCLVKDYFPEPVTVSWNSGALTSG | | DFATYYCQQANSFPPT | |
| | VHTFPAVLQSSGLYSLSSVVTVPSSSLGTK | | FGGGTKVEIKRTVAAP | |
| | TYTCNVDHKPSNTKVDKRVSKYGPPCPS | | SVFIFPPSDEQLKSGTA | |
| | CPPEFLGGPSVFLFPPKPKDTLMISRTPEV | | SVVCLLNNFYPREAK | |
| | TCVVVDVSQEDPEVQFNWYVDGVEVHN | | VQWKVDNALQSGNS | |
| | AKTKPREEQFNSTYRVVSVLTVLHQDWL | | QESVTEQDSKDSTYSL | |
| | NGKEYKCKVSNKGLPSSIEKTISKAKQPR | | SSTLTLSKADYEKHKV | |
| | EPQVYTLPPSQEEMTKNQVSLTCLVKGFY | | YACEVTHQGLSSPVT | |
| | PSDIAVEWESNGQPENNYKTTPPVLDSDG | | KSFNRGEC | |
| | SFFLYSRLTVDKSRWQEGNVFSCSVMHE | | | |
| | ALHNHYTQKSLSLSLGK | | | |
| 135 | EVQLLESGGGLVQPGGSLRLSCAASGFTF | 1849 | DIVMTQSPLSLPVTPG | 1937 |
| | DEYAMHWVRQAPGKGLEWVSAIGAGGS | | EPASISCRSSQSLLHSN | |
| | TYYADSVKGRFTISRDNSKNTLYLQMNS | | GYNYLDWYLQKPGQS | |
| | LRAEDTAVYYCASSLGPELRGVDYYYYG | | PQLLIYAASSLQSGVP | |
| | MDVWGQGTTVTVSSSTKGPSVFPLAPCS | | DRFSGSGSGTDFTLKIS | |
| | RSTSESTAALGCLVKDYFPEPVTVSWNSG | | RVEAEDVGVYYCMQ | |
| | ALTSGVHTFPAVLQSSGLYSLSSVVTVPSS | | GIQWPWTFGQGTKVE | |
| | SLGTKTYTCNVDHKPSNTKVDKRVSKYG | | IKRTVAAPSVFIFPPSD | |
| | PPCPSCPPEFLGGPSVFLFPPKPKDTLMISR | | EQLKSGTASVVCLLN | |
| | TPEVTCVVVDVSQEDPEVQFNWYVDGVE | | NFYPREAKVQWKVD | |
| | VHNAKTKPREEQFNSTYRVVSVLTVLHQ | | NALQSGNSQESVTEQ | |
| | DWLNGKEYKCKVSNKGLPSSIEKTISKAK | | DSKDSTYSLSSTLTLS | |
| | QPREPQVYTLPPSQEEMTKNQVSLTCLVK | | KADYEKHKVYACEVT | |
| | GFYPSDIAVEWESNGQPENNYKTTPPVLD | | HQGLSSPVTKSFNRGE | |
| | SDGSFFLYSRLTVDKSRWQEGNVFSCSV | | C | |
| | MHEALHNHYTQKSLSLSLGK | | | |
| 136 | EVQLLESGGGLVQPGGSLRLSCAASGFNF | 1850 | DIQMTQSPSSLSASVG | 1938 |
| | DDYAMHWVRQAPGKGLEWVSVIYSGGS | | DRVTITCRASQSISTYV | |
| | TYYADSVKGRFTISRDNSKNTLYLQMNS | | NWYQQKPGKAPKLLI | |
| | LRAEDTAVYYCTRHDFDYWGQGTLVTV | | YAASSLQSGVPSRFSG | |
| | SSSTKGPSVFPLAPCSRSTSESTAALGCLV | | SGSGTDFTLTISSLQPE | |
| | KDYFPEPVTVSWNSGALTSGVHTFPAVL | | DFATYYCQQDYSYPY | |
| | QSSGLYSLSSVVTVPSSSLGTKTYTCNVD | | TFGQGTKVEIKRTVAA | |
| | HKPSNTKVDKRVSKYGPPCPSCPPEFLGG | | PSVFIFPPSDEQLKSGT | |
| | PSVFLFPPKPKDTLMISRTPEVTCVVVDVS | | ASVVCLLNNFYPREA | |
| | QEDPEVQFNWYVDGVEVHNAKTKPREE | | KVQWKVDNALQSGN | |
| | QFNSTYRVVSVLTVLHQDWLNGKEYKC | | SQESVTEQDSKDSTYS | |
| | KVSNKGLPSSIEKTISKAKQPREPQVYTLP | | LSSTLTLSKADYEKHK | |
| | PSQEEMTKNQVSLTCLVKGFYPSDIAVE | | VYACEVTHQGLSSPV | |
| | WESNGQPENNYKTTPPVLDSDGSFFLYSR | | TKSFNRGEC | |
| | LTVDKSRWQEGNVFSCSVMHEALHNHY | | | |
| | TQKSLSLSLGK | | | |
| 137 | EVQLVESGGGLVKPGGSLRLSCAASGFTF | 1851 | DIQMTQSPSSLSASVG | 1939 |
| | SDYALHWVRQAPGKGLEWVSLISGDGGS | | DRVTITCRASQSISTW | |
| | TYYADSVKGRFTISRDDSKNTLYLQMNS | | LAWYQQKPGKAPKLL | |
| | LKTEDTAVYYCARDLGGERSYWGQGTL | | IYAASTLQSGVPSRFS | |
| | VTVSSSTKGPSVFPLAPCSRSTSESTAALG | | GSGSGTDFTLTISSLQP | |
| | CLVKDYFPEPVTVSWNSGALTSGVHTFP | | EDFATYYCLQDYSYPP | |
| | AVLQSSGLYSLSSVVTVPSSSLGTKTYTC | | TFGQGTKVEIKRTVAA | |
| | NVDHKPSNTKVDKRVSKYGPPCPSCPPEF | | PSVFIFPPSDEQLKSGT | |
| | LGGPSVFLFPPKPKDTLMISRTPEVTCVVV | | ASVVCLLNNFYPREA | |
| | DVSQEDPEVQFNWYVDGVEVHNAKTKP | | KVQWKVDNALQSGN | |
| | REEQFNSTYRVVSVLTVLHQDWLNGKEY | | SQESVTEQDSKDSTYS | |
| | KCKVSNKGLPSSIEKTISKAKQPREPQVYT | | LSSTLTLSKADYEKHK | |
| | LPPSQEEMTKNQVSLTCLVKGFYPSDIAV | | VYACEVTHQGLSSPV | |
| | EWESNGQPENNYKTTPPVLDSDGSFFLYS | | TKSFNRGEC | |
| | RLTVDKSRWQEGNVFSCSVMHEALHNH | | | |
| | YTQKSLSLSLGK | | | |
| 138 | QVQLVQSGAEVKKPGASVKVSCKASGYT | 1852 | DIQMTQSPSSLSASVG | 1940 |
| | FTDYYMHWVRQAPGQGLEWMGIINPSD | | DRVTITCRASQSISSW | |
| | GSTTYAQSFQGRVTMTRDTSTSTVYMEL | | LAWYQQKPGKAPKLL | |
| | SSLRSEDTAVYYCARDELPDSSGWYGYF | | IYAASSLQSGVPSRFS | |
| | QHWGQGTLVTVSSSTKGPSVFPLAPCSRS | | GSGSGTDFTLTISSLQP | |
| | TSESTAALGCLVKDYFPEPVTVSWNSGAL | | EDFATYYCQQSYDIPL | |
| | TSGVHTFPAVLQSSGLYSLSSVVTVPSSSL | | TFGGGTKVEIKRTVAA | |
| | GTKTYTCNVDHKPSNTKVDKRVSKYGPP | | PSVFIFPPSDEQLKSGT | |
| | CPSCPPEFLGGPSVFLFPPKPKDTLMISRTP | | ASVVCLLNNFYPREA | |
| | EVTCVVVDVSQEDPEVQFNWYVDGVEV | | KVQWKVDNALQSGN | |
| | HNAKTKPREEQFNSTYRVVSVLTVLHQD | | SQESVTEQDSKDSTYS | |
| | WLNGKEYKCKVSNKGLPSSIEKTISKAKQ | | LSSTLTLSKADYEKHK | |
| | PREPQVYTLPPSQEEMTKNQVSLTCLVKG | | VYACEVTHQGLSSPV | |
| | FYPSDIAVEWESNGQPENNYKTTPPVLDS | | TKSFNRGEC | |
| | DGSFFLYSRLTVDKSRWQEGNVFSCSVM | | | |
| | HEALHNHYTQKSLSLSLGK | | | |
| 139 | QVQLVQSGAEVKKPGSSVKVSCKASGGT | 1853 | DIQMTQSPSSLSASVG | 1941 |
| | FSSYAISWVRQAPGQGLEWMGEIIPFFGT | | DRVTITCQASQDISNL | |
| | ANYAQKFQGRVTITADESTSTAYMELSSL | | LNWYQQKPGKAPKLL | |
| | RSEDTAVYYCARAEYGGDLDYWGQGTL | | IYAASTLQSGVPSRES | |
| | VTVSSSTKGPSVFPLAPCSRSTSESTAALG | | GSGSGTDFTLTISSLQP | |
| | CLVKDYFPEPVTVSWNSGALTSGVHTFP | | EDFATYYCQQSYNTP | |
| | AVLQSSGLYSLSSVVTVPSSSLGTKTYTC | | WTFGPGTKVDIKRTV | |
| | NVDHKPSNTKVDKRVSKYGPPCPSCPPEF | | AAPSVFIFPPSDEQLKS | |
| | LGGPSVFLFPPKPKDTLMISRTPEVTCVVV | | GTASVVCLLNNFYPRE | |
| | DVSQEDPEVQFNWYVDGVEVHNAKTKP | | AKVQWKVDNALQSG | |
| | REEQFNSTYRVVSVLTVLHQDWLNGKEY | | NSQESVTEQDSKDSTY | |
| | KCKVSNKGLPSSIEKTISKAKQPREPQVYT | | SLSSTLTLSKADYEKH | |
| | LPPSQEEMTKNQVSLTCLVKGFYPSDIAV | | KVYACEVTHQGLSSP | |
| | EWESNGQPENNYKTTPPVLDSDGSFFLYS | | VTKSFNRGEC | |
| | RLTVDKSRWQEGNVFSCSVMHEALHNH | | | |
| | YTQKSLSLSLGK | | | |
| 140 | QVQLVQSGAEVKKPGASVKVSCKASGDT | 1854 | DIQMTQSPSSLSASVG | 1942 |
| | FTRHYVHWVRQAPGQGLEWMGIINPRGG | | DRVTITCQASQDIHNY | |
| | THYAQKFQGRVTMTRDTSTSTVYMELSS | | LNWYQQKPGKAPKLL | |
| | LRSEDTAVYYCARRDCSGGSCYSDLDYW | | IYQASSLESGVPSRFSG | |
| | GQGTLVTVSSSTKGPSVFPLAPCSRSTSES | | SGSGTDFTLTISSLQPE | |
| | TAALGCLVKDYFPEPVTVSWNSGALTSG | | DFATYYCQQANSFPLT | |
| | VHTFPAVLQSSGLYSLSSVVTVPSSSLGTK | | FGGGTKLEIKRTVAAP | |
| | TYTCNVDHKPSNTKVDKRVSKYGPPCPS | | SVFIFPPSDEQLKSGTA | |
| | CPPEFLGGPSVFLFPPKPKDTLMISRTPEV | | SVVCLLNNFYPREAK | |
| | TCVVVDVSQEDPEVQFNWYVDGVEVHN | | VQWKVDNALQSGNS | |
| | AKTKPREEQFNSTYRVVSVLTVLHQDWL | | QESVTEQDSKDSTYSL | |
| | NGKEYKCKVSNKGLPSSIEKTISKAKQPR | | SSTLTLSKADYEKHKV | |
| | EPQVYTLPPSQEEMTKNQVSLTCLVKGFY | | YACEVTHQGLSSPVT | |
| | PSDIAVEWESNGQPENNYKTTPPVLDSDG | | KSFNRGEC | |
| | SFFLYSRLTVDKSRWQEGNVFSCSVMHE | | | |
| | ALHNHYTQKSLSLSLGK | | | |
| 141 | QVQLVQSGAEVKKPGASVKVSCKASGGT | 1855 | DIQMTQSPSSLSASVG | 1943 |
| | FSSYAISWVRQAPGQGLEWMGWINPDSG | | DRVTITCRASQNIGSW | |
| | DASYARKFQGRVTMTRDTSTSTVYMELS | | LAWYQQKPGKAPKLL | |
| | SLRSEDTAVYYCATFGEEAFDIWGQGTM | | IYGASILQSGVPSRFSG | |
| | VTVSSSTKGPSVFPLAPCSRSTSESTAALG | | SGSGTDFTLTISSLQPE | |
| | CLVKDYFPEPVTVSWNSGALTSGVHTFP | | DFATYYCQQANSFPLT | |
| | AVLQSSGLYSLSSVVTVPSSSLGTKTYTC | | FGGGTKLEIKRTVAAP | |
| | NVDHKPSNTKVDKRVSKYGPPCPSCPPEF | | SVFIFPPSDEQLKSGTA | |
| | LGGPSVFLFPPKPKDTLMISRTPEVTCVVV | | SVVCLLNNFYPREAK | |
| | DVSQEDPEVQFNWYVDGVEVHNAKTKP | | VQWKVDNALQSGNS | |
| | REEQFNSTYRVVSVLTVLHQDWLNGKEY | | QESVTEQDSKDSTYSL | |
| | KCKVSNKGLPSSIEKTISKAKQPREPQVYT | | SSTLTLSKADYEKHKV | |
| | LPPSQEEMTKNQVSLTCLVKGFYPSDIAV | | YACEVTHQGLSSPVT | |
| | EWESNGQPENNYKTTPPVLDSDGSFFLYS | | KSFNRGEC | |
| | RLTVDKSRWQEGNVFSCSVMHEALHNH | | | |
| | YTQKSLSLSLGK | | | |
| 142 | QVQLVQSGAEVKKPGASVKVSCKASGGT | 1856 | DIQMTQSPSSLSASVG | 1944 |
| | FSSYAISWVRQAPGQGLEWMGWIDPKNG | | DRVTITCRASQGIGNW | |
| | DTNYAQKFQGRVTMTRDTSTSTVYMELS | | LAWYQQKPGKAPKLL | |
| | SLRSEDTAVYYCATEGSHHPYYYYGMDV | | IYEASTLQSGVPSRFSG | |
| | WGQGTTVTVSSSTKGPSVFPLAPCSRSTS | | SGSGTDFTLTISSLQPE | |
| | ESTAALGCLVKDYFPEPVTVSWNSGALTS | | DFATYYCHQYNAYP | |
| | GVHTFPAVLQSSGLYSLSSVVTVPSSSLGT | | WTFGQGTKVEIKRTV | |
| | KTYTCNVDHKPSNTKVDKRVSKYGPPCP | | AAPSVFIFPPSDEQLKS | |
| | SCPPEFLGGPSVFLFPPKPKDTLMISRTPE | | GTASVVCLLNNFYPRE | |
| | VTCVVVDVSQEDPEVQFNWYVDGVEVH | | AKVQWKVDNALQSG | |
| | NAKTKPREEQFNSTYRVVSVLTVLHQDW | | NSQESVTEQDSKDSTY | |
| | LNGKEYKCKVSNKGLPSSIEKTISKAKQP | | SLSSTLTLSKADYEKH | |
| | REPQVYTLPPSQEEMTKNQVSLTCLVKGF | | KVYACEVTHQGLSSP | |
| | YPSDIAVEWESNGQPENNYKTTPPVLDSD | | VTKSFNRGEC | |
| | GSFFLYSRLTVDKSRWQEGNVFSCSVMH | | | |
| | EALHNHYTQKSLSLSLGK | | | |
| 143 | QVQLVQSGAEVKKPGASVKVSCKASGYT | 1857 | DIQMTQSPSSLSASVG | 1945 |
| | FTGYHMHWVRQAPGQGLEWMGWINPN | | DRVTITCQASQDISNY | |
| | TGGTNYAQKFQGRVTMTRDTSTSTVYME | | LNWYQQKPGKAPKLL | |
| | LSSLRSEDTAVYYCARPNTAMVPPYYYY | | IYAASSLQSGVPSRFS | |
| | YGMDVWGQGTLVTVSSSTKGPSVFPLAP | | GSGSGTDFTLTISSLQP | |
| | CSRSTSESTAALGCLVKDYFPEPVTVSWN | | EDFATYYCQQYNSYP | |
| | SGALTSGVHTFPAVLQSSGLYSLSSVVTV | | LTFGQGTKLEIKRTVA | |
| | PSSSLGTKTYTCNVDHKPSNTKVDKRVS | | APSVFIFPPSDEQLKSG | |
| | KYGPPCPSCPPEFLGGPSVFLFPPKPKDTL | | TASVVCLLNNFYPREA | |
| | MISRTPEVTCVVVDVSQEDPEVQFNWYV | | KVQWKVDNALQSGN | |
| | DGVEVHNAKTKPREEQFNSTYRVVSVLT | | SQESVTEQDSKDSTYS | |
| | VLHQDWLNGKEYKCKVSNKGLPSSIEKTI | | LSSTLTLSKADYEKHK | |
| | SKAKQPREPQVYTLPPSQEEMTKNQVSLT | | VYACEVTHQGLSSPV | |
| | CLVKGFYPSDIAVEWESNGQPENNYKTTP | | TKSFNRGEC | |
| | PVLDSDGSFFLYSRLTVDKSRWQEGNVFS | | | |
| | CSVMHEALHNHYTQKSLSLSLGK | | | |
| 144 | QVQLVQSGAEVKKPGASVKVSCKASGYT | 1858 | DIQMTQSPSSLSASVG | 1946 |
| | FTSYDINWVRQAPGQGLEWMGWMNPNS | | DRVTITCRASHSISSW | |
| | GNTGYAQKFQGRVTMTRDTSTSTVYMEL | | LAWYQQKPGKAPKLL | |
| | SSLRSEDTAVYYCARVSATGTYGLDYWG | | IYDASNLETGVPSRFS | |
| | QGTLVTVSSSTKGPSVFPLAPCSRSTSEST | | GSGSGTDFTLTISSLQP | |
| | AALGCLVKDYFPEPVTVSWNSGALTSGV | | EDFATYYCQQADSFPL | |
| | HTFPAVLQSSGLYSLSSVVTVPSSSLGTKT | | TFGGGTKVEIKRTVAA | |
| | YTCNVDHKPSNTKVDKRVSKYGPPCPSC | | PSVFIFPPSDEQLKSGT | |
| | PPEFLGGPSVFLFPPKPKDTLMISRTPEVT | | ASVVCLLNNFYPREA | |
| | CVVVDVSQEDPEVQFNWYVDGVEVHNA | | KVQWKVDNALQSGN | |
| | KTKPREEQFNSTYRVVSVLTVLHQDWLN | | SQESVTEQDSKDSTYS | |
| | GKEYKCKVSNKGLPSSIEKTISKAKQPREP | | LSSTLTLSKADYEKHK | |
| | QVYTLPPSQEEMTKNQVSLTCLVKGFYPS | | VYACEVTHQGLSSPV | |
| | DIAVEWESNGQPENNYKTTPPVLDSDGSF | | TKSFNRGEC | |
| | FLYSRLTVDKSRWQEGNVFSCSVMHEAL | | | |
| | HNHYTQKSLSLSLGK | | | |
| 145 | QVQLVQSGAEVKKPGASVKVSCKASGYT | 1859 | DIQMTQSPSSLSASVG | 1947 |
| | FNNYGITWVRQAPGQGLEWMGIINPITGV | | DRVTITCQASQDINDY | |
| | TTYAQNFQGRVTMTRDTSTSTVYMELSS | | LNWYQQKPGKAPKLL | |
| | LRSEDTAVYYCASGEQQLVLFDYWGQGT | | IYGASNLQSGVPSRFS | |
| | LVTVSSSTKGPSVFPLAPCSRSTSESTAAL | | GSGSGTDFTLTISSLQP | |
| | GCLVKDYFPEPVTVSWNSGALTSGVHTF | | EDFATYYCLQHNSYP | |
| | PAVLQSSGLYSLSSVVTVPSSSLGTKTYTC | | LTFGQGTKLEIKRTVA | |
| | NVDHKPSNTKVDKRVSKYGPPCPSCPPEF | | APSVFIFPPSDEQLKSG | |
| | LGGPSVFLFPPKPKDTLMISRTPEVTCVVV | | TASVVCLLNNFYPREA | |
| | DVSQEDPEVQFNWYVDGVEVHNAKTKP | | KVQWKVDNALQSGN | |
| | REEQFNSTYRVVSVLTVLHQDWLNGKEY | | SQESVTEQDSKDSTYS | |
| | KCKVSNKGLPSSIEKTISKAKQPREPQVYT | | LSSTLTLSKADYEKHK | |
| | LPPSQEEMTKNQVSLTCLVKGFYPSDIAV | | VYACEVTHQGLSSPV | |
| | EWESNGQPENNYKTTPPVLDSDGSFFLYS | | TKSFNRGEC | |
| | RLTVDKSRWQEGNVFSCSVMHEALHNH | | | |
| | YTQKSLSLSLGK | | | |
| 146 | QVQLVQSGAEVKKPGASVKVSCKASGYT | 1860 | DIQMTQSPSSLSASVG | 1948 |
| | FTDYYLHWVRQAPGQGLEWMGWMNPN | | DRVTITCRASQGISNY | |
| | SGNTGYAQKFQGRVTMTRDTSTSTVYME | | LAWYQQKPGKAPKLL | |
| | LSSLRSEDTAVYYCAADVITAYGMDVWG | | IYDASNLETGVPSRFS | |
| | QGTMVTVSSSTKGPSVFPLAPCSRSTSEST | | GSGSGTDFTLTISSLQP | |
| | AALGCLVKDYFPEPVTVSWNSGALTSGV | | EDFATYYCQQSYNVP | |
| | HTFPAVLQSSGLYSLSSVVTVPSSSLGTKT | | PTFGQGTKVEIKRTVA | |
| | YTCNVDHKPSNTKVDKRVSKYGPPCPSC | | APSVFIFPPSDEQLKSG | |
| | PPEFLGGPSVFLFPPKPKDTLMISRTPEVT | | TASVVCLLNNFYPREA | |
| | CVVVDVSQEDPEVQFNWYVDGVEVHNA | | KVQWKVDNALQSGN | |
| | KTKPREEQFNSTYRVVSVLTVLHQDWLN | | SQESVTEQDSKDSTYS | |
| | GKEYKCKVSNKGLPSSIEKTISKAKQPREP | | LSSTLTLSKADYEKHK | |
| | QVYTLPPSQEEMTKNQVSLTCLVKGFYPS | | VYACEVTHQGLSSPV | |
| | DIAVEWESNGQPENNYKTTPPVLDSDGSF | | TKSFNRGEC | |
| | FLYSRLTVDKSRWQEGNVFSCSVMHEAL | | | |
| | HNHYTQKSLSLSLGK | | | |
| 147 | EVQLLESGGGLVQPGGSLRLSCAASGFTF | 1861 | DIQMTQSPSSLSASVG | 1949 |
| | SNAWMSWVRQAPGKGLEWVADISYDGT | | DRVTITCRASQSISSYL | |
| | NDYYADSVKGRFTISRDNSKNTLYLQMN | | NWYQQKPGKAPKLLI | |
| | SLRAEDTAVYYCTTEELRFGGFDYWGQG | | YDASNLETGVPSRFSG | |
| | TLVTVSSSTKGPSVFPLAPCSRSTSESTAA | | SGSGTDFTLTISSLQPE | |
| | LGCLVKDYFPEPVTVSWNSGALTSGVHT | | DFATYYCQQANSFPLT | |
| | FPAVLQSSGLYSLSSVVTVPSSSLGTKTYT | | FGQGTKVEIKRTVAAP | |
| | CNVDHKPSNTKVDKRVSKYGPPCPSCPPE | | SVFIFPPSDEQLKSGTA | |
| | FLGGPSVFLFPPKPKDTLMISRTPEVTCVV | | SVVCLLNNFYPREAK | |
| | VDVSQEDPEVQFNWYVDGVEVHNAKTK | | VQWKVDNALQSGNS | |
| | PREEQFNSTYRVVSVLTVLHQDWLNGKE | | QESVTEQDSKDSTYSL | |
| | YKCKVSNKGLPSSIEKTISKAKQPREPQV | | SSTLTLSKADYEKHKV | |
| | YTLPPSQEEMTKNQVSLTCLVKGFYPSDI | | YACEVTHQGLSSPVT | |
| | AVEWESNGQPENNYKTTPPVLDSDGSFFL | | KSFNRGEC | |
| | YSRLTVDKSRWQEGNVFSCSVMHEALHN | | | |
| | HYTQKSLSLSLGK | | | |
| 148 | QVQLVQSGAEVKKPGSSVKVSCKASGGT | 1862 | EIVMTQSPATLSVSPG | 1950 |
| | FSSYAISWVRQAPGQGLEWMGGIIPMFGT | | ERATLSCRASQSIGTY | |
| | ANYAQKFQGRVTITADESTSTAYMELSSL | | LAWYQQKPGQAPRLL | |
| | RSEDTAVYYCARDLGYSNAGGTLHYWG | | IYDASSRATGIPARFSG | |
| | QGTLVTVSSSTKGPSVFPLAPCSRSTSEST | | SGSGTEFTLTISSLQSE | |
| | AALGCLVKDYFPEPVTVSWNSGALTSGV | | DFAVYYCQQYKSYPL | |
| | HTFPAVLQSSGLYSLSSVVTVPSSSLGTKT | | TFGGGTKVEIKRTVAA | |
| | YTCNVDHKPSNTKVDKRVSKYGPPCPSC | | PSVFIFPPSDEQLKSGT | |
| | PPEFLGGPSVFLFPPKPKDTLMISRTPEVT | | ASVVCLLNNFYPREA | |
| | CVVVDVSQEDPEVQFNWYVDGVEVHNA | | KVQWKVDNALQSGN | |
| | KTKPREEQFNSTYRVVSVLTVLHQDWLN | | SQESVTEQDSKDSTYS | |
| | GKEYKCKVSNKGLPSSIEKTISKAKQPREP | | LSSTLTLSKADYEKHK | |
| | QVYTLPPSQEEMTKNQVSLTCLVKGFYPS | | VYACEVTHQGLSSPV | |
| | DIAVEWESNGQPENNYKTTPPVLDSDGSF | | TKSFNRGEC | |
| | FLYSRLTVDKSRWQEGNVFSCSVMHEAL | | | |
| | HNHYTQKSLSLSLGK | | | |
| 149 | QVQLVQSGAEVKKPGASVKVSCKASGYT | 1863 | DIQMTQSPSSLSASVG | 1951 |
| | FTNYYMHWVRQAPGQGLEWMGIINPSG | | DRVTITCQASQDISNY | |
| | GSTSYAQKFQGRVTMTRDTSTSTVYMEL | | LNWYQQKPGKAPKLL | |
| | SSLRSEDTAVYYCARAEWDILTGYYIDY | | IYGASSLQSGVPSRFS | |
| | WGQGTLVTVSSSTKGPSVFPLAPCSRSTS | | GSGSGTDFTLTISSLQP | |
| | ESTAALGCLVKDYFPEPVTVSWNSGALTS | | EDFATYYCQQHNSYP | |
| | GVHTFPAVLQSSGLYSLSSVVTVPSSSLGT | | WTFGQGTKVEIKRTV | |
| | KTYTCNVDHKPSNTKVDKRVSKYGPPCP | | AAPSVFIFPPSDEQLKS | |
| | SCPPEFLGGPSVFLFPPKPKDTLMISRTPE | | GTASVVCLLNNFYPRE | |
| | VTCVVVDVSQEDPEVQFNWYVDGVEVH | | AKVQWKVDNALQSG | |
| | NAKTKPREEQFNSTYRVVSVLTVLHQDW | | NSQESVTEQDSKDSTY | |
| | LNGKEYKCKVSNKGLPSSIEKTISKAKQP | | SLSSTLTLSKADYEKH | |
| | REPQVYTLPPSQEEMTKNQVSLTCLVKGF | | KVYACEVTHQGLSSP | |
| | YPSDIAVEWESNGQPENNYKTTPPVLDSD | | VTKSFNRGEC | |
| | GSFFLYSRLTVDKSRWQEGNVFSCSVMH | | | |
| | EALHNHYTQKSLSLSLGK | | | |
| 150 | QVQLVQSGAEVKKPGASVKVSCKASGYT | 1864 | DIQMTQSPSSLSASVG | 1952 |
| | FTDHFVHWVRQAPGQGLEWMGWISAYN | | DRVTITCRASQGIHNY | |
| | GNTNYAQKFQGRVTMTRDTSTSTVYMEL | | LAWYQQKPGKAPKLL | |
| | SSLRSEDTAVYYCARAEYSYGFDYWGQG | | IYDASNLETGVPSRFS | |
| | TLVTVSSSTKGPSVFPLAPCSRSTSESTAA | | GSGSGTDFTLTISSLQP | |
| | LGCLVKDYFPEPVTVSWNSGALTSGVHT | | EDFATYYCQQTSSFPY | |
| | FPAVLQSSGLYSLSSVVTVPSSSLGTKTYT | | TFGQGTKLEIKRTVAA | |
| | CNVDHKPSNTKVDKRVSKYGPPCPSCPPE | | PSVFIFPPSDEQLKSGT | |
| | FLGGPSVFLFPPKPKDTLMISRTPEVTCVV | | ASVVCLLNNFYPREA | |
| | VDVSQEDPEVQFNWYVDGVEVHNAKTK | | KVQWKVDNALQSGN | |
| | PREEQFNSTYRVVSVLTVLHQDWLNGKE | | SQESVTEQDSKDSTYS | |
| | YKCKVSNKGLPSSIEKTISKAKQPREPQV | | LSSTLTLSKADYEKHK | |
| | YTLPPSQEEMTKNQVSLTCLVKGFYPSDI | | VYACEVTHQGLSSPV | |
| | AVEWESNGQPENNYKTTPPVLDSDGSFFL | | TKSFNRGEC | |
| | YSRLTVDKSRWQEGNVFSCSVMHEALHN | | | |
| | HYTQKSLSLSLGK | | | |
| 151 | QVQLVQSGAEVKKPGASVKVSCKASGYT | 1865 | DIQMTQSPSSLSASVG | 1953 |
| | FTGYYVHWVRQAPGQGLEWMGVINPSG | | DRVTITCQASQDISNY | |
| | GGSPSYAQKFQGRVTMTRDTSTSTVYME | | LNWYQQKPGKAPKLL | |
| | LSSLRSEDTAVYYCARDRSDVDYGMDV | | IYDASNLQSGVPSRFS | |
| | WGQGTTVTVSSSTKGPSVFPLAPCSRSTS | | GSGSGTDFTLTISSLQP | |
| | ESTAALGCLVKDYFPEPVTVSWNSGALTS | | EDFATYYCLQHNSYP | |
| | GVHTFPAVLQSSGLYSLSSVVTVPSSSLGT | | LTFGGGTKVEIKRTVA | |
| | KTYTCNVDHKPSNTKVDKRVSKYGPPCP | | APSVFIFPPSDEQLKSG | |
| | SCPPEFLGGPSVFLFPPKPKDTLMISRTPE | | TASVVCLLNNFYPREA | |
| | VTCVVVDVSQEDPEVQFNWYVDGVEVH | | KVQWKVDNALQSGN | |
| | NAKTKPREEQFNSTYRVVSVLTVLHQDW | | SQESVTEQDSKDSTYS | |
| | LNGKEYKCKVSNKGLPSSIEKTISKAKQP | | LSSTLTLSKADYEKHK | |
| | REPQVYTLPPSQEEMTKNQVSLTCLVKGF | | VYACEVTHQGLSSPV | |
| | YPSDIAVEWESNGQPENNYKTTPPVLDSD | | TKSFNRGEC | |
| | GSFFLYSRLTVDKSRWQEGNVFSCSVMH | | | |
| | EALHNHYTQKSLSLSLGK | | | |
| 152 | QVQLVQSGAEVKKPGASVKVSCKASGYT | 1866 | DIVMTQSPLSLPVTPG | 1954 |
| | FTDYYMHWVRQAPGQGLEWMGLIDPSG | | EPASISCRSSQSLLHSN | |
| | GSTNSLQKFQGRVTMTRDTSTSTVYMEL | | GYNYLDWYLQKPGQS | |
| | SSLRSEDTAVYYCARDVGFGELSFDIWGQ | | PQLLIYAASTLQSGVP | |
| | GTTVTVSSSTKGPSVFPLAPCSRSTSESTA | | DRFSGSGSGTDFTLKIS | |
| | ALGCLVKDYFPEPVTVSWNSGALTSGVH | | RVEAEDVGVYYCMQ | |
| | TFPAVLQSSGLYSLSSVVTVPSSSLGTKTY | | GTHWPPTFGPGTKVDI | |
| | TCNVDHKPSNTKVDKRVSKYGPPCPSCPP | | KRTVAAPSVFIFPPSDE | |
| | EFLGGPSVFLFPPKPKDTLMISRTPEVTCV | | QLKSGTASVVCLLNN | |
| | VVDVSQEDPEVQFNWYVDGVEVHNAKT | | FYPREAKVQWKVDN | |
| | KPREEQFNSTYRVVSVLTVLHQDWLNGK | | ALQSGNSQESVTEQDS | |
| | EYKCKVSNKGLPSSIEKTISKAKQPREPQV | | KDSTYSLSSTLTLSKA | |
| | YTLPPSQEEMTKNQVSLTCLVKGFYPSDI | | DYEKHKVYACEVTHQ | |
| | AVEWESNGQPENNYKTTPPVLDSDGSFFL | | GLSSPVTKSFNRGEC | |
| | YSRLTVDKSRWQEGNVFSCSVMHEALHN | | | |
| | HYTQKSLSLSLGK | | | |
| 153 | QVQLVQSGAEVKKPGASVKVSCKASGYT | 1867 | DIQMTQSPSSLSASVG | 1955 |
| | FTGYYMHWVRQAPGQGLEWMGWINPNS | | DRVTITCRASQSIGTY | |
| | GGTNYAQKFQGRVTMTRDTSTSTVYMEL | | LNWYQQKPGKAPKLL | |
| | SSLRSEDTAVYYCAREIGGYDNYYYYGM | | IYAASSLQSGVPSRFS | |
| | DVWGQGTTVTVSSSTKGPSVFPLAPCSRS | | GSGSGTDFTLTISSLQP | |
| | TSESTAALGCLVKDYFPEPVTVSWNSGAL | | EDFATYYCQQSYTDP | |
| | TSGVHTFPAVLQSSGLYSLSSVVTVPSSSL | | WTFGQGTKVEIKRTV | |
| | GTKTYTCNVDHKPSNTKVDKRVSKYGPP | | AAPSVFIFPPSDEQLKS | |
| | CPSCPPEFLGGPSVFLFPPKPKDTLMISRTP | | GTASVVCLLNNFYPRE | |
| | EVTCVVVDVSQEDPEVQFNWYVDGVEV | | AKVQWKVDNALQSG | |
| | HNAKTKPREEQFNSTYRVVSVLTVLHQD | | NSQESVTEQDSKDSTY | |
| | WLNGKEYKCKVSNKGLPSSIEKTISKAKQ | | SLSSTLTLSKADYEKH | |
| | PREPQVYTLPPSQEEMTKNQVSLTCLVKG | | KVYACEVTHQGLSSP | |
| | FYPSDIAVEWESNGQPENNYKTTPPVLDS | | VTKSFNRGEC | |
| | DGSFFLYSRLTVDKSRWQEGNVFSCSVM | | | |
| | HEALHNHYTQKSLSLSLGK | | | |
| 154 | QVQLVQSGAEVKKPGASVKVSCKASGYT | 1868 | DIQMTQSPSSLSASVG | 1956 |
| | FNTYYMHWVRQAPGQGLEWMGWMHPN | | DRVTITCRASQSIFSYL | |
| | TGNTGYAQKFQGRVTMTRDTSTSTVYME | | NWYQQKPGKAPKLLI | |
| | LSSLRSEDTAVYYCARGTTSDAFDIWGQ | | YSASNLQSGVPSRFSG | |
| | GTMVTVSSSTKGPSVFPLAPCSRSTSESTA | | SGSGTDFTLTISSLQPE | |
| | ALGCLVKDYFPEPVTVSWNSGALTSGVH | | DFATYYCQQSYSTPIT | |
| | TFPAVLQSSGLYSLSSVVTVPSSSLGTKTY | | FGQGTKVEIKRTVAAP | |
| | TCNVDHKPSNTKVDKRVSKYGPPCPSCPP | | SVFIFPPSDEQLKSGTA | |
| | EFLGGPSVFLFPPKPKDTLMISRTPEVTCV | | SVVCLLNNFYPREAK | |
| | VVDVSQEDPEVQFNWYVDGVEVHNAKT | | VQWKVDNALQSGNS | |
| | KPREEQFNSTYRVVSVLTVLHQDWLNGK | | QESVTEQDSKDSTYSL | |
| | EYKCKVSNKGLPSSIEKTISKAKQPREPQV | | SSTLTLSKADYEKHKV | |
| | YTLPPSQEEMTKNQVSLTCLVKGFYPSDI | | YACEVTHQGLSSPVT | |
| | AVEWESNGQPENNYKTTPPVLDSDGSFFL | | KSFNRGEC | |
| | YSRLTVDKSRWQEGNVFSCSVMHEALHN | | | |
| | HYTQKSLSLSLGK | | | |
| 155 | QVQLVQSGAEVKKPGASVKVSCKASGDT | 1869 | DIQMTQSPSSLSASVG | 1957 |
| | FTRHYVHWVRQAPGQGLEWMGRVNPRD | | DRVTITCRASQGISSYL | |
| | GRTNSAQKFQGRVTMTRDTSTSTVYMEL | | AWYQQKPGKAPKLLI | |
| | SSLRSEDTAVYYCAKDMFPTVTGTYYYY | | YDASNLETGVPSRFSG | |
| | GMDVWGQGTTVTVSSSTKGPSVFPLAPC | | SGSGTDFTLTISSLQPE | |
| | SRSTSESTAALGCLVKDYFPEPVTVSWNS | | DFATYYCQQASGFPY | |
| | GALTSGVHTFPAVLQSSGLYSLSSVVTVP | | TFGQGTRLEIKRTVAA | |
| | SSSLGTKTYTCNVDHKPSNTKVDKRVSK | | PSVFIFPPSDEQLKSGT | |
| | YGPPCPSCPPEFLGGPSVFLFPPKPKDTLM | | ASVVCLLNNFYPREA | |
| | ISRTPEVTCVVVDVSQEDPEVQFNWYVD | | KVQWKVDNALQSGN | |
| | GVEVHNAKTKPREEQFNSTYRVVSVLTV | | SQESVTEQDSKDSTYS | |
| | LHQDWLNGKEYKCKVSNKGLPSSIEKTIS | | LSSTLTLSKADYEKHK | |
| | KAKQPREPQVYTLPPSQEEMTKNQVSLT | | VYACEVTHQGLSSPV | |
| | CLVKGFYPSDIAVEWESNGQPENNYKTTP | | TKSFNRGEC | |
| | PVLDSDGSFFLYSRLTVDKSRWQEGNVFS | | | |
| | CSVMHEALHNHYTQKSLSLSLGK | | | |
| 156 | QVQLVQSGAEVKKPGASVKVSCKASGYT | 1870 | DIQMTQSPSSLSASVG | 1958 |
| | FSSYDINWVRQAPGQGLEWVGWINPRNG | | DRVTITCRASQSISNYL | |
| | GTDYAQKFQGRVTMTRDTSTSTVYMELS | | NWYQQKPGKAPKLLI | |
| | SLRSEDTAVYYCARHRWELDSFDYWGQ | | YATSSLQSGVPSRFSG | |
| | GTLVTVSSSTKGPSVFPLAPCSRSTSESTA | | SGSGTDFTLTISSLQPE | |
| | ALGCLVKDYFPEPVTVSWNSGALTSGVH | | DFATYYCQQGYNIPFT | |
| | TFPAVLQSSGLYSLSSVVTVPSSSLGTKTY | | FGQGTKLEIKRTVAAP | |
| | TCNVDHKPSNTKVDKRVSKYGPPCPSCPP | | SVFIFPPSDEQLKSGTA | |
| | EFLGGPSVFLFPPKPKDTLMISRTPEVTCV | | SVVCLLNNFYPREAK | |
| | VVDVSQEDPEVQFNWYVDGVEVHNAKT | | VQWKVDNALQSGNS | |
| | KPREEQFNSTYRVVSVLTVLHQDWLNGK | | QESVTEQDSKDSTYSL | |
| | EYKCKVSNKGLPSSIEKTISKAKQPREPQV | | SSTLTLSKADYEKHKV | |
| | YTLPPSQEEMTKNQVSLTCLVKGFYPSDI | | YACEVTHQGLSSPVT | |
| | AVEWESNGQPENNYKTTPPVLDSDGSFFL | | KSFNRGEC | |
| | YSRLTVDKSRWQEGNVFSCSVMHEALHN | | | |
| | HYTQKSLSLSLGK | | | |
| 157 | QVQLVQSGAEVKKPGASVKVSCKASGYT | 1871 | DIQMTQSPSSLSASVG | 1959 |
| | FTSYYIHWVRQAPGQGLEWMGWMNPND | | DRVTITCRASESISGW | |
| | GKTAYAQRFQGRVTMTRDTSTSTVYMEL | | LAWYQQKPGKAPKLL | |
| | SSLRSEDTAVYYCARDDDYGGYVAYWG | | IYDASNLETGVPSRFS | |
| | QGTLVTVSSSTKGPSVFPLAPCSRSTSEST | | GSGSGTDFTLTISSLQP | |
| | AALGCLVKDYFPEPVTVSWNSGALTSGV | | EDFATYYCQQYDTWP | |
| | HTFPAVLQSSGLYSLSSVVTVPSSSLGTKT | | FTFGPGTKVDIKRTVA | |
| | YTCNVDHKPSNTKVDKRVSKYGPPCPSC | | APSVFIFPPSDEQLKSG | |
| | PPEFLGGPSVFLFPPKPKDTLMISRTPEVT | | TASVVCLLNNFYPREA | |
| | CVVVDVSQEDPEVQFNWYVDGVEVHNA | | KVQWKVDNALQSGN | |
| | KTKPREEQFNSTYRVVSVLTVLHQDWLN | | SQESVTEQDSKDSTYS | |
| | GKEYKCKVSNKGLPSSIEKTISKAKQPREP | | LSSTLTLSKADYEKHK | |
| | QVYTLPPSQEEMTKNQVSLTCLVKGFYPS | | VYACEVTHQGLSSPV | |
| | DIAVEWESNGQPENNYKTTPPVLDSDGSF | | TKSFNRGEC | |
| | FLYSRLTVDKSRWQEGNVFSCSVMHEAL | | | |
| | HNHYTQKSLSLSLGK | | | |
| 158 | EVQLLESGGGLVQPGGSLRLSCAASGMS | 1872 | DIQMTQSPSSLSASVG | 1960 |
| | VTSNHMSWVRQAPGKGLEWVSSIYPDGK | | DRVTITCQASQSISNW | |
| | TYYADSVKGRFTISRDNSKNTLYLQMNS | | LAWYQQKPGKAPKLL | |
| | LRAEDTAVYYCARDEEDWFDPWGQGTL | | IYAASTLQSGVPSRFS | |
| | VTVSSSTKGPSVFPLAPCSRSTSESTAALG | | GSGSGTDFTLTISSLQP | |
| | CLVKDYFPEPVTVSWNSGALTSGVHTFP | | EDFATYYCQQSYSTP | |
| | AVLQSSGLYSLSSVVTVPSSSLGTKTYTC | | WTFGQGTKVEIKRTV | |
| | NVDHKPSNTKVDKRVSKYGPPCPSCPPEF | | AAPSVFIFPPSDEQLKS | |
| | LGGPSVFLFPPKPKDTLMISRTPEVTCVVV | | GTASVVCLLNNFYPRE | |
| | DVSQEDPEVQFNWYVDGVEVHNAKTKP | | AKVQWKVDNALQSG | |
| | REEQFNSTYRVVSVLTVLHQDWLNGKEY | | NSQESVTEQDSKDSTY | |
| | KCKVSNKGLPSSIEKTISKAKQPREPQVYT | | SLSSTLTLSKADYEKH | |
| | LPPSQEEMTKNQVSLTCLVKGFYPSDIAV | | KVYACEVTHQGLSSP | |
| | EWESNGQPENNYKTTPPVLDSDGSFFLYS | | VTKSFNRGEC | |
| | RLTVDKSRWQEGNVFSCSVMHEALHNH | | | |
| | YTQKSLSLSLGK | | | |
| 159 | EVQLLESGGGLVQPGGSLRLSCAASGFTF | 1873 | DIQMTQSPSSLSASVG | 1961 |
| | SNHYMSWVRQAPGKGLEWVAVIWPDGS | | DRVTITCQASQDISNY | |
| | KEYYADSVKGRFTISRDNSKNTLYLQMN | | LNWYQQKPGKAPKLL | |
| | SLRAEDTAVYYCAREDYYGSGMDYWGQ | | IYGASTLQSGVPSRFS | |
| | GTLVTVSSSTKGPSVFPLAPCSRSTSESTA | | GSGSGTDFTLTISSLQP | |
| | ALGCLVKDYFPEPVTVSWNSGALTSGVH | | EDFATYYCQQYDSYP | |
| | TFPAVLQSSGLYSLSSVVTVPSSSLGTKTY | | PTFGGGTKVEIKRTVA | |
| | TCNVDHKPSNTKVDKRVSKYGPPCPSCPP | | APSVFIFPPSDEQLKSG | |
| | EFLGGPSVFLFPPKPKDTLMISRTPEVTCV | | TASVVCLLNNFYPREA | |
| | VVDVSQEDPEVQFNWYVDGVEVHNAKT | | KVQWKVDNALQSGN | |
| | KPREEQFNSTYRVVSVLTVLHQDWLNGK | | SQESVTEQDSKDSTYS | |
| | EYKCKVSNKGLPSSIEKTISKAKQPREPQV | | LSSTLTLSKADYEKHK | |
| | YTLPPSQEEMTKNQVSLTCLVKGFYPSDI | | VYACEVTHQGLSSPV | |
| | AVEWESNGQPENNYKTTPPVLDSDGSFFL | | TKSFNRGEC | |
| | YSRLTVDKSRWQEGNVFSCSVMHEALHN | | | |
| | HYTQKSLSLSLGK | | | |
| 160 | QVQLVQSGAEVKKPGASVKVSCKASGGT | 1874 | DIQMTQSPSSLSASVG | 1962 |
| | FSNYAISWVRQAPGQGLEWMGWISAYN | | DRVTITCQASEDINKY | |
| | GNSDYAQNLQGRVTMTRDTSTSTVYMEL | | LNWYQQKPGKAPKLL | |
| | SSLRSEDTAVYYCAIGDYFDYWGQGTLV | | IYDASNLETGVPSRFS | |
| | TVSSSTKGPSVFPLAPCSRSTSESTAALGC | | GSGSGTDFTLTISSLQP | |
| | LVKDYFPEPVTVSWNSGALTSGVHTFPA | | EDFATYYCQQANSFPL | |
| | VLQSSGLYSLSSVVTVPSSSLGTKTYTCN | | TFGQGTKVEIKRTVAA | |
| | VDHKPSNTKVDKRVSKYGPPCPSCPPEFL | | PSVFIFPPSDEQLKSGT | |
| | GGPSVFLFPPKPKDTLMISRTPEVTCVVV | | ASVVCLLNNFYPREA | |
| | DVSQEDPEVQFNWYVDGVEVHNAKTKP | | KVQWKVDNALQSGN | |
| | REEQFNSTYRVVSVLTVLHQDWLNGKEY | | SQESVTEQDSKDSTYS | |
| | KCKVSNKGLPSSIEKTISKAKQPREPQVYT | | LSSTLTLSKADYEKHK | |
| | LPPSQEEMTKNQVSLTCLVKGFYPSDIAV | | VYACEVTHQGLSSPV | |
| | EWESNGQPENNYKTTPPVLDSDGSFFLYS | | TKSFNRGEC | |
| | RLTVDKSRWQEGNVFSCSVMHEALHNH | | | |
| | YTQKSLSLSLGK | | | |
| 161 | EVQLLESGGGLVQPGGSLRLSCAASGFTV | 1875 | DIQMTQSPSSLSASVG | 1963 |
| | SSNYMSWVRQAPGKGLEWVAVIYSDGK | | DRVTITCRASQSISTYL | |
| | TYYADSVKGRFTISRDNSKNTLYLQMNS | | NWYQQKPGKAPKLLI | |
| | LRAEDTAVYYCAREDSSGSHFDYWGQGT | | YDASNLETGVPSRFSG | |
| | LVTVSSSTKGPSVFPLAPCSRSTSESTAAL | | SGSGTDFTLTISSLQPE | |
| | GCLVKDYFPEPVTVSWNSGALTSGVHTF | | DFATYYCQQAHSFPPT | |
| | PAVLQSSGLYSLSSVVTVPSSSLGTKTYTC | | FGQGTRLEIKRTVAAP | |
| | NVDHKPSNTKVDKRVSKYGPPCPSCPPEF | | SVFIFPPSDEQLKSGTA | |
| | LGGPSVFLFPPKPKDTLMISRTPEVTCVVV | | SVVCLLNNFYPREAK | |
| | DVSQEDPEVQFNWYVDGVEVHNAKTKP | | VQWKVDNALQSGNS | |
| | REEQFNSTYRVVSVLTVLHQDWLNGKEY | | QESVTEQDSKDSTYSL | |
| | KCKVSNKGLPSSIEKTISKAKQPREPQVYT | | SSTLTLSKADYEKHKV | |
| | LPPSQEEMTKNQVSLTCLVKGFYPSDIAV | | YACEVTHQGLSSPVT | |
| | EWESNGQPENNYKTTPPVLDSDGSFFLYS | | KSFNRGEC | |
| | RLTVDKSRWQEGNVFSCSVMHEALHNH | | | |
| | YTQKSLSLSLGK | | | |
| 162 | QVQLVQSGAEVKKPGSSVKVSCKASGYT | 1876 | DIQMTQSPSSLSASVG | 1964 |
| | FTKYEINWVRQAPGQGLEWMGGIIPIFGT | | DRVTITCRASQGISNN | |
| | ANYAQKFQGRVTITADESTSTAYMELSSL | | LNWYQQKPGKAPKLL | |
| | RSEDTAVYYCARGSGWYTPLFDYWGQG | | IYDASYLETGVPSRFS | |
| | TLVTVSSSTKGPSVFPLAPCSRSTSESTAA | | GSGSGTDFTLTISSLQP | |
| | LGCLVKDYFPEPVTVSWNSGALTSGVHT | | EDFATYYCQQSYSAPL | |
| | FPAVLQSSGLYSLSSVVTVPSSSLGTKTYT | | TFGQGTKVEIKRTVAA | |
| | CNVDHKPSNTKVDKRVSKYGPPCPSCPPE | | PSVFIFPPSDEQLKSGT | |
| | FLGGPSVFLFPPKPKDTLMISRTPEVTCVV | | ASVVCLLNNFYPREA | |
| | VDVSQEDPEVQFNWYVDGVEVHNAKTK | | KVQWKVDNALQSGN | |
| | PREEQFNSTYRVVSVLTVLHQDWLNGKE | | SQESVTEQDSKDSTYS | |
| | YKCKVSNKGLPSSIEKTISKAKQPREPQV | | LSSTLTLSKADYEKHK | |
| | YTLPPSQEEMTKNQVSLTCLVKGFYPSDI | | VYACEVTHQGLSSPV | |
| | AVEWESNGQPENNYKTTPPVLDSDGSFFL | | TKSFNRGEC | |
| | YSRLTVDKSRWQEGNVFSCSVMHEALHN | | | |
| | HYTQKSLSLSLGK | | | |
| 163 | QVQLVQSGAEVKKPGASVKVSCKASGYT | 1877 | EIVMTQSPATLSVSPG | 1965 |
| | FTDYYIHWVRQAPGQGLEWMGLIDPSGG | | ERATLSCRASQSVSSY | |
| | STSIAQKFQGRVTMTRDTSTSTVYMELSS | | LAWYQQKPGQAPRLL | |
| | LRSEDTAVYYCARDYDILTGSGFDPWGQ | | IYDASARATGIPARFS | |
| | GTLVTVSSSTKGPSVFPLAPCSRSTSESTA | | GSGSGTEFTLTISSLQS | |
| | ALGCLVKDYFPEPVTVSWNSGALTSGVH | | EDFAVYYCQQYRSSV | |
| | TFPAVLQSSGLYSLSSVVTVPSSSLGTKTY | | TFGQGTRLEIKRTVAA | |
| | TCNVDHKPSNTKVDKRVSKYGPPCPSCPP | | PSVFIFPPSDEQLKSGT | |
| | EFLGGPSVFLFPPKPKDTLMISRTPEVTCV | | ASVVCLLNNFYPREA | |
| | VVDVSQEDPEVQFNWYVDGVEVHNAKT | | KVQWKVDNALQSGN | |
| | KPREEQFNSTYRVVSVLTVLHQDWLNGK | | SQESVTEQDSKDSTYS | |
| | EYKCKVSNKGLPSSIEKTISKAKQPREPQV | | LSSTLTLSKADYEKHK | |
| | YTLPPSQEEMTKNQVSLTCLVKGFYPSDI | | VYACEVTHQGLSSPV | |
| | AVEWESNGQPENNYKTTPPVLDSDGSFFL | | TKSFNRGEC | |
| | YSRLTVDKSRWQEGNVFSCSVMHEALHN | | | |
| | HYTQKSLSLSLGK | | | |
| 164 | QVQLVQSGAEVKKPGASVKVSCKASGYT | 1878 | DIQMTQSPSSLSASVG | 1966 |
| | FTTYYMHWVRQAPGQGLEWMGIINVSA | | DRVTITCQASQDINNY | |
| | GTTSYAQKFQGRVTMTRDTSTSTVYMEL | | LNWYQQKPGKAPKLL | |
| | SSLRSEDTAVYYCAKEPYPHQSGWFFDY | | IYDASNLETGVPSRFS | |
| | WGQGTLVTVSSSTKGPSVFPLAPCSRSTS | | GSGSGTDFTLTISSLQP | |
| | ESTAALGCLVKDYFPEPVTVSWNSGALTS | | EDFATYYCQQANSFPL | |
| | GVHTFPAVLQSSGLYSLSSVVTVPSSSLGT | | TFGGGTKVEIKRTVAA | |
| | KTYTCNVDHKPSNTKVDKRVSKYGPPCP | | PSVFIFPPSDEQLKSGT | |
| | SCPPEFLGGPSVFLFPPKPKDTLMISRTPE | | ASVVCLLNNFYPREA | |
| | VTCVVVDVSQEDPEVQFNWYVDGVEVH | | KVQWKVDNALQSGN | |
| | NAKTKPREEQFNSTYRVVSVLTVLHQDW | | SQESVTEQDSKDSTYS | |
| | LNGKEYKCKVSNKGLPSSIEKTISKAKQP | | LSSTLTLSKADYEKHK | |
| | REPQVYTLPPSQEEMTKNQVSLTCLVKGF | | VYACEVTHQGLSSPV | |
| | YPSDIAVEWESNGQPENNYKTTPPVLDSD | | TKSFNRGEC | |
| | GSFFLYSRLTVDKSRWQEGNVFSCSVMH | | | |
| | EALHNHYTQKSLSLSLGK | | | |
| 165 | QVQLVQSGAEVKKPGASVKVSCKASGYT | 1879 | EIVMTQSPATLSVSPG | 1967 |
| | FTGHYMHWVRQAPGQGLEWMGWISTD | | ERATLSCSASQSVGSS | |
| | NGNANYAQKFQGRVTMTRDTSTSTVYM | | YFAWYQQKPGQAPRL | |
| | ELSSLRSEDTAVYYCARDTADYYFDYWG | | LIYDVSTRATGIPARFS | |
| | QGTLVTVSSSTKGPSVFPLAPCSRSTSEST | | GSGSGTEFTLTISSLQS | |
| | AALGCLVKDYFPEPVTVSWNSGALTSGV | | EDFAVYYCQQYYSTP | |
| | HTFPAVLQSSGLYSLSSVVTVPSSSLGTKT | | LTFGPGTKVDIKRTVA | |
| | YTCNVDHKPSNTKVDKRVSKYGPPCPSC | | APSVFIFPPSDEQLKSG | |
| | PPEFLGGPSVFLFPPKPKDTLMISRTPEVT | | TASVVCLLNNFYPREA | |
| | CVVVDVSQEDPEVQFNWYVDGVEVHNA | | KVQWKVDNALQSGN | |
| | KTKPREEQFNSTYRVVSVLTVLHQDWLN | | SQESVTEQDSKDSTYS | |
| | GKEYKCKVSNKGLPSSIEKTISKAKQPREP | | LSSTLTLSKADYEKHK | |
| | QVYTLPPSQEEMTKNQVSLTCLVKGFYPS | | VYACEVTHQGLSSPV | |
| | DIAVEWESNGQPENNYKTTPPVLDSDGSF | | TKSFNRGEC | |
| | FLYSRLTVDKSRWQEGNVFSCSVMHEAL | | | |
| | HNHYTQKSLSLSLGK | | | |
| 166 | QVQLVQSGAEVKKPGSSVKVSCKASGGT | 1880 | DIQMTQSPSSLSASVG | 1968 |
| | FSRYPFSWVRQAPGQGLEWMGWMNPNN | | DRVTITCQASQDISNY | |
| | GDTGYAQKFQGRVTITADESTSTAYMEL | | LNWYQQKPGKAPKLL | |
| | SSLRSEDTAVYYCARGDYPYMDVWGKG | | IYDASNLETGVPSRFS | |
| | TTVTVSSSTKGPSVFPLAPCSRSTSESTAA | | GSGSGTDFTLTISSLQP | |
| | LGCLVKDYFPEPVTVSWNSGALTSGVHT | | EDFATYYCQQSYSIPY | |
| | FPAVLQSSGLYSLSSVVTVPSSSLGTKTYT | | TFGQGTKLEIKRTVAA | |
| | CNVDHKPSNTKVDKRVSKYGPPCPSCPPE | | PSVFIFPPSDEQLKSGT | |
| | FLGGPSVFLFPPKPKDTLMISRTPEVTCVV | | ASVVCLLNNFYPREA | |
| | VDVSQEDPEVQFNWYVDGVEVHNAKTK | | KVQWKVDNALQSGN | |
| | PREEQFNSTYRVVSVLTVLHQDWLNGKE | | SQESVTEQDSKDSTYS | |
| | YKCKVSNKGLPSSIEKTISKAKQPREPQV | | LSSTLTLSKADYEKHK | |
| | YTLPPSQEEMTKNQVSLTCLVKGFYPSDI | | VYACEVTHQGLSSPV | |
| | AVEWESNGQPENNYKTTPPVLDSDGSFFL | | TKSFNRGEC | |
| | YSRLTVDKSRWQEGNVFSCSVMHEALHN | | | |
| | HYTQKSLSLSLGK | | | |
| 167 | QVQLVQSGAEVKKPGASVKVSCKASGYT | 1881 | DIQMTQSPSSLSASVG | 1969 |
| | FTSDYMHWVRQAPGQGLEWMGWMNPN | | DRVTITCRASQGIRND | |
| | SGGTNYAQKFQGRVTMTRDTSTSTVYME | | LGWYQQKPGKAPKLL | |
| | LSSLRSEDTAVYYCARDYITGPSDWGQG | | IYAASSLQPGVPSRFS | |
| | TLVTVSSSTKGPSVFPLAPCSRSTSESTAA | | GSGSGTDFTLTISSLQP | |
| | LGCLVKDYFPEPVTVSWNSGALTSGVHT | | EDFATYYCLQTNSFP | |
| | FPAVLQSSGLYSLSSVVTVPSSSLGTKTYT | | WTFGQGTKLEIKRTV | |
| | CNVDHKPSNTKVDKRVSKYGPPCPSCPPE | | AAPSVFIFPPSDEQLKS | |
| | FLGGPSVFLFPPKPKDTLMISRTPEVTCVV | | GTASVVCLLNNFYPRE | |
| | VDVSQEDPEVQFNWYVDGVEVHNAKTK | | AKVQWKVDNALQSG | |
| | PREEQFNSTYRVVSVLTVLHQDWLNGKE | | NSQESVTEQDSKDSTY | |
| | YKCKVSNKGLPSSIEKTISKAKQPREPQV | | SLSSTLTLSKADYEKH | |
| | YTLPPSQEEMTKNQVSLTCLVKGFYPSDI | | KVYACEVTHQGLSSP | |
| | AVEWESNGQPENNYKTTPPVLDSDGSFFL | | VTKSFNRGEC | |
| | YSRLTVDKSRWQEGNVFSCSVMHEALHN | | | |
| | HYTQKSLSLSLGK | | | |
| 168 | QVQLVQSGAEVKKPGASVKVSCKASGFT | 1882 | DIQMTQSPSSLSASVG | 1970 |
| | FTSYYMHWVRQAPGQGLEWMGWMNPN | | DRVTITCRASQSISSW | |
| | SGNTGYAQRFQGRVTMTRDTSTSTVYME | | LAWYQQKPGKAPKLL | |
| | LSSLRSEDTAVYYCARGHSRTDYGMDV | | IYDTSSLQSGVPSRFSG | |
| | WGQGTTVTVSSSTKGPSVFPLAPCSRSTS | | SGSGTDFTLTISSLQPE | |
| | ESTAALGCLVKDYFPEPVTVSWNSGALTS | | DFATYYCQQGYSTPL | |
| | GVHTFPAVLQSSGLYSLSSVVTVPSSSLGT | | TFGQGTKVEIKRTVAA | |
| | KTYTCNVDHKPSNTKVDKRVSKYGPPCP | | PSVFIFPPSDEQLKSGT | |
| | SCPPEFLGGPSVFLFPPKPKDTLMISRTPE | | ASVVCLLNNFYPREA | |
| | VTCVVVDVSQEDPEVQFNWYVDGVEVH | | KVQWKVDNALQSGN | |
| | NAKTKPREEQFNSTYRVVSVLTVLHQDW | | SQESVTEQDSKDSTYS | |
| | LNGKEYKCKVSNKGLPSSIEKTISKAKQP | | LSSTLTLSKADYEKHK | |
| | REPQVYTLPPSQEEMTKNQVSLTCLVKGF | | VYACEVTHQGLSSPV | |
| | YPSDIAVEWESNGQPENNYKTTPPVLDSD | | TKSFNRGEC | |
| | GSFFLYSRLTVDKSRWQEGNVFSCSVMH | | | |
| | EALHNHYTQKSLSLSLGK | | | |
| 169 | EVQLLESGGGLVQPGGSLRLSCAASGFTF | 1883 | DIQMTQSPSSLSASVG | 1971 |
| | SDHYMSWVRQAPGKGLEWVSIIYPDGKT | | DRVTITCQASQDISNY | |
| | YYADSVKGRFTISRDNSKNTLYLQMNSL | | LNWYQQKPGKAPKLL | |
| | RAEDTAVYYCAREGSYGDYDGMDVWG | | IYGASTLQSGVPSRFS | |
| | QGTTVTVSSSTKGPSVFPLAPCSRSTSEST | | GSGSGTDFTLTISSLQP | |
| | AALGCLVKDYFPEPVTVSWNSGALTSGV | | EDFATYYCQQSYSTP | |
| | HTFPAVLQSSGLYSLSSVVTVPSSSLGTKT | | WTFGQGTKLEIKRTV | |
| | YTCNVDHKPSNTKVDKRVSKYGPPCPSC | | AAPSVFIFPPSDEQLKS | |
| | PPEFLGGPSVFLFPPKPKDTLMISRTPEVT | | GTASVVCLLNNFYPRE | |
| | CVVVDVSQEDPEVQFNWYVDGVEVHNA | | AKVQWKVDNALQSG | |
| | KTKPREEQFNSTYRVVSVLTVLHQDWLN | | NSQESVTEQDSKDSTY | |
| | GKEYKCKVSNKGLPSSIEKTISKAKQPREP | | SLSSTLTLSKADYEKH | |
| | QVYTLPPSQEEMTKNQVSLTCLVKGFYPS | | KVYACEVTHQGLSSP | |
| | DIAVEWESNGQPENNYKTTPPVLDSDGSF | | VTKSFNRGEC | |
| | FLYSRLTVDKSRWQEGNVFSCSVMHEAL | | | |
| | HNHYTQKSLSLSLGK | | | |
| 170 | QVQLVQSGAEVKKPGSSVKVSCKASGGT | 1884 | EIVMTQSPATLSVSPG | 1972 |
| | FSNYDISWVRQAPGQGLEWMGGIIPIFGT | | ERATLSCRASQSVSSY | |
| | ANYAQKFQGRVTITADESTSTAYMELSSL | | LAWYQQKPGQAPRLL | |
| | RSEDTAVYYCAREAEEGGWFDPWGQGT | | IYGASTRATGIPARFSG | |
| | LVTVSSSTKGPSVFPLAPCSRSTSESTAAL | | SGSGTEFTLTISSLQSE | |
| | GCLVKDYFPEPVTVSWNSGALTSGVHTF | | DFAVYYCQQYAFSPIT | |
| | PAVLQSSGLYSLSSVVTVPSSSLGTKTYTC | | FGQGTKLEIKRTVAAP | |
| | NVDHKPSNTKVDKRVSKYGPPCPSCPPEF | | SVFIFPPSDEQLKSGTA | |
| | LGGPSVFLFPPKPKDTLMISRTPEVTCVVV | | SVVCLLNNFYPREAK | |
| | DVSQEDPEVQFNWYVDGVEVHNAKTKP | | VQWKVDNALQSGNS | |
| | REEQFNSTYRVVSVLTVLHQDWLNGKEY | | QESVTEQDSKDSTYSL | |
| | KCKVSNKGLPSSIEKTISKAKQPREPQVYT | | SSTLTLSKADYEKHKV | |
| | LPPSQEEMTKNQVSLTCLVKGFYPSDIAV | | YACEVTHQGLSSPVT | |
| | EWESNGQPENNYKTTPPVLDSDGSFFLYS | | KSFNRGEC | |
| | RLTVDKSRWQEGNVFSCSVMHEALHNH | | | |
| | YTQKSLSLSLGK | | | |
| 171 | QVQLVQSGAEVKKPGASVKVSCKASGYT | 1885 | DIQMTQSPSSLSASVG | 1973 |
| | FTDYYMHWVRQAPGQGLEWMGWMNPN | | DRVTITCRVSQGISSYL | |
| | SGYTAYAQKFQGRVTMTRDTSTSTVYME | | NWYQQKPGKAPKLLI | |
| | LSSLRSEDTAVYYCAKDTPGSGWSSGMD | | YDASNLETGVPSRFSG | |
| | VWGQGTTVTVSSSTKGPSVFPLAPCSRST | | SGSGTDFTLTISSLQPE | |
| | SESTAALGCLVKDYFPEPVTVSWNSGALT | | DFATYYCQQSYSTPLT | |
| | SGVHTFPAVLQSSGLYSLSSVVTVPSSSLG | | FGGGTKVEIKRTVAAP | |
| | TKTYTCNVDHKPSNTKVDKRVSKYGPPC | | SVFIFPPSDEQLKSGTA | |
| | PSCPPEFLGGPSVFLFPPKPKDTLMISRTPE | | SVVCLLNNFYPREAK | |
| | VTCVVVDVSQEDPEVQFNWYVDGVEVH | | VQWKVDNALQSGNS | |
| | NAKTKPREEQFNSTYRVVSVLTVLHQDW | | QESVTEQDSKDSTYSL | |
| | LNGKEYKCKVSNKGLPSSIEKTISKAKQP | | SSTLTLSKADYEKHKV | |
| | REPQVYTLPPSQEEMTKNQVSLTCLVKGF | | YACEVTHQGLSSPVT | |
| | YPSDIAVEWESNGQPENNYKTTPPVLDSD | | KSFNRGEC | |
| | GSFFLYSRLTVDKSRWQEGNVFSCSVMH | | | |
| | EALHNHYTQKSLSLSLGK | | | |
| 172 | QVQLVQSGAEVKKPGASVKVSCKASGGT | 1886 | DIQMTQSPSSLSASVG | 1974 |
| | FSNYAISWVRQAPGQGLEWMGWINPNSG | | DRVTITCRASQSISSW | |
| | GTNYAQKFQGRVTMTRDTSTSTVYMELS | | LAWYQQKPGKAPKLL | |
| | SLRSEDTAVYYCARVGYYDSSGGGMDV | | IYDASNLETGVPSRFS | |
| | WGQGTTVTVSSSTKGPSVFPLAPCSRSTS | | GSGSGTDFTLTISSLQP | |
| | ESTAALGCLVKDYFPEPVTVSWNSGALTS | | EDFATYYCLQTHSFPL | |
| | GVHTFPAVLQSSGLYSLSSVVTVPSSSLGT | | TFGPGTKVDIKRTVAA | |
| | KTYTCNVDHKPSNTKVDKRVSKYGPPCP | | PSVFIFPPSDEQLKSGT | |
| | SCPPEFLGGPSVFLFPPKPKDTLMISRTPE | | ASVVCLLNNFYPREA | |
| | VTCVVVDVSQEDPEVQFNWYVDGVEVH | | KVQWKVDNALQSGN | |
| | NAKTKPREEQFNSTYRVVSVLTVLHQDW | | SQESVTEQDSKDSTYS | |
| | LNGKEYKCKVSNKGLPSSIEKTISKAKQP | | LSSTLTLSKADYEKHK | |
| | REPQVYTLPPSQEEMTKNQVSLTCLVKGF | | VYACEVTHQGLSSPV | |
| | YPSDIAVEWESNGQPENNYKTTPPVLDSD | | TKSFNRGEC | |
| | GSFFLYSRLTVDKSRWQEGNVFSCSVMH | | | |
| | EALHNHYTQKSLSLSLGK | | | |
| 173 | QVQLVQSGAEVKKPGASVKVSCKASGYT | 1887 | DIQMTQSPSSLSASVG | 1975 |
| | FTGYYMHWVRQAPGQGLEWMGIINPIGG | | DRVTITCRASQSVSNW | |
| | LTTYAQKFQGRVTMTRDTSTSTVYMELS | | LAWYQQKPGKAPKLL | |
| | SLRSEDTAVYYCASGAYGDYVDWYFDL | | IYDASNLQTGVPSRFS | |
| | WGRGTLVTVSSSTKGPSVFPLAPCSRSTS | | GSGSGTDFTLTISSLQP | |
| | ESTAALGCLVKDYFPEPVTVSWNSGALTS | | EDFATYYCQQANSFPL | |
| | GVHTFPAVLQSSGLYSLSSVVTVPSSSLGT | | TFGGGTKLEIKRTVAA | |
| | KTYTCNVDHKPSNTKVDKRVSKYGPPCP | | PSVFIFPPSDEQLKSGT | |
| | SCPPEFLGGPSVFLFPPKPKDTLMISRTPE | | ASVVCLLNNFYPREA | |
| | VTCVVVDVSQEDPEVQFNWYVDGVEVH | | KVQWKVDNALQSGN | |
| | NAKTKPREEQFNSTYRVVSVLTVLHQDW | | SQESVTEQDSKDSTYS | |
| | LNGKEYKCKVSNKGLPSSIEKTISKAKQP | | LSSTLTLSKADYEKHK | |
| | REPQVYTLPPSQEEMTKNQVSLTCLVKGF | | VYACEVTHQGLSSPV | |
| | YPSDIAVEWESNGQPENNYKTTPPVLDSD | | TKSFNRGEC | |
| | GSFFLYSRLTVDKSRWQEGNVFSCSVMH | | | |
| | EALHNHYTQKSLSLSLGK | | | |
| 174 | QVQLVQSGAEVKKPGASVKVSCKASGYT | 1888 | DIVMTQSPLSLPVTPG | 1976 |
| | FTTYGISWVRQAPGQGLEWMGWINPNSG | | EPASISCRSSRSLLHSN | |
| | DTNYAQKFQGRVTMTRDTSTSTVYMELS | | GYNYLDWYLQKPGQS | |
| | SLRSEDTAVYYCARLTTATDSFDLWGRG | | PQLLIYLGSYRASGVP | |
| | TLVTVSSSTKGPSVFPLAPCSRSTSESTAA | | DRFSGSGSGTDFTLKIS | |
| | LGCLVKDYFPEPVTVSWNSGALTSGVHT | | RVEAEDVGVYYCMQ | |
| | FPAVLQSSGLYSLSSVVTVPSSSLGTKTYT | | GTHWPPTFGQGTKLEI | |
| | CNVDHKPSNTKVDKRVSKYGPPCPSCPPE | | KRTVAAPSVFIFPPSDE | |
| | FLGGPSVFLFPPKPKDTLMISRTPEVTCVV | | QLKSGTASVVCLLNN | |
| | VDVSQEDPEVQFNWYVDGVEVHNAKTK | | FYPREAKVQWKVDN | |
| | PREEQFNSTYRVVSVLTVLHQDWLNGKE | | ALQSGNSQESVTEQDS | |
| | YKCKVSNKGLPSSIEKTISKAKQPREPQV | | KDSTYSLSSTLTLSKA | |
| | YTLPPSQEEMTKNQVSLTCLVKGFYPSDI | | DYEKHKVYACEVTHQ | |
| | AVEWESNGQPENNYKTTPPVLDSDGSFFL | | GLSSPVTKSFNRGEC | |
| | YSRLTVDKSRWQEGNVFSCSVMHEALHN | | | |
| | HYTQKSLSLSLGK | | | |
| 175 | QVQLVQSGAEVKKPGASVKVSCKASGYS | 1889 | DIQMTQSPSSLSASVG | 1977 |
| | FTNYYIHWVRQAPGQGLEWMGWMNPY | | DRVTITCRASQSISSYL | |
| | TGQTGYAQKFQGRVTMTRDTSTSTVYME | | NWYQQKPGKAPKLLI | |
| | LSSLRSEDTAVYYCTTDEETMDFHLWGR | | YDASNLETGVPSRFSG | |
| | GTLVTVSSSTKGPSVFPLAPCSRSTSESTA | | SGSGTDFTLTISSLQPE | |
| | ALGCLVKDYFPEPVTVSWNSGALTSGVH | | DFATYYCQQANTFPIT | |
| | TFPAVLQSSGLYSLSSVVTVPSSSLGTKTY | | FGQGTRLEIKRTVAAP | |
| | TCNVDHKPSNTKVDKRVSKYGPPCPSCPP | | SVFIFPPSDEQLKSGTA | |
| | EFLGGPSVFLFPPKPKDTLMISRTPEVTCV | | SVVCLLNNFYPREAK | |
| | VVDVSQEDPEVQFNWYVDGVEVHNAKT | | VQWKVDNALQSGNS | |
| | KPREEQFNSTYRVVSVLTVLHQDWLNGK | | QESVTEQDSKDSTYSL | |
| | EYKCKVSNKGLPSSIEKTISKAKQPREPQV | | SSTLTLSKADYEKHKV | |
| | YTLPPSQEEMTKNQVSLTCLVKGFYPSDI | | YACEVTHQGLSSPVT | |
| | AVEWESNGQPENNYKTTPPVLDSDGSFFL | | KSFNRGEC | |
| | YSRLTVDKSRWQEGNVFSCSVMHEALHN | | | |
| | HYTQKSLSLSLGK | | | |
| 176 | QVQLVQSGAEVKKPGASVKVSCKASGYT | 1890 | DIVMTQSPLSLPVTPG | 1978 |
| | FTGYHIHWVRQAPGQGLEWMGRINPNSG | | EPASISCRSSRSLLHSN | |
| | GTDYAQKFQGRVTMTRDTSTSTVYMELS | | GYNYLDWYLQKPGQS | |
| | SLRSEDTAVYYCARETYSGSYEESFDYW | | PQLLIYLGSDRASGVP | |
| | GQGTLVTVSSSTKGPSVFPLAPCSRSTSES | | DRFSGSGSGTDFTLKIS | |
| | TAALGCLVKDYFPEPVTVSWNSGALTSG | | RVEAEDVGVYYCMQ | |
| | VHTFPAVLQSSGLYSLSSVVTVPSSSLGTK | | GTHWPPTFGQGTKVEI | |
| | TYTCNVDHKPSNTKVDKRVSKYGPPCPS | | KRTVAAPSVFIFPPSDE | |
| | CPPEFLGGPSVFLFPPKPKDTLMISRTPEV | | QLKSGTASVVCLLNN | |
| | TCVVVDVSQEDPEVQFNWYVDGVEVHN | | FYPREAKVQWKVDN | |
| | AKTKPREEQFNSTYRVVSVLTVLHQDWL | | ALQSGNSQESVTEQDS | |
| | NGKEYKCKVSNKGLPSSIEKTISKAKQPR | | KDSTYSLSSTLTLSKA | |
| | EPQVYTLPPSQEEMTKNQVSLTCLVKGFY | | DYEKHKVYACEVTHQ | |
| | PSDIA VEWESNGQPENNYKTTPPVLDSDG | | GLSSPVTKSFNRGEC | |
| | SFFLYSRLTVDKSRWQEGNVFSCSVMHE | | | |
| | ALHNHYTQKSLSLSLGK | | | |

### Example 15: AML Cell Line Xenograft Model Using Antibody Drug Conjugate

[1342] Antibody drug conjugates may be generated by conjugating a biologically active compound to a variant specific antibody. Examples may include the conjugation of molecules such as saporin (a ribosome inactivating protein), MMAE, MMAF, DM1, or DM4 to an anti-CD33^{R69} antibody or anti-CD33^{G69} antibody, leading to cell death upon antigen binding and antibody mediated internalization of the drug.

[1343] Six to ten week old immunodeficient NOD.Cg-Prkdcscid Il2rgtm1Wjl Tg(CMV-IL3,CSF2,KITLG)1Eav/MloySzJ (NSG-SGM3) mice may be used in murine patient-derived xenograft experiments. Both male and female mice may be used in experiments and randomly assigned to a treatment group.

[1344] Target AML cell lines may be obtained from commercially vendors (ATCC). Target expression was confirmed by FACS analysis and target cell genotype obtained through DNA sequencing. Cells may be modified to express CBR-GFP (Click beetle luciferase and Green Fluorescent Protein).

[1345] Mice are engrafted with an appropriate amount, e.g., 1×10⁶ cells on day −7. On day 0 mice are treated with an appropriate amount of ADC (e.g., dosing ranging from 0.1 mg/kg to 5 mg/kg) on days 0, +7, and +14.

[1346] For example, a CD33^{R69} AML Cell line, KG1a, may be engrafted into mice and treated with either anti-CD33^{G69}-saporin or anti-CD33^{R69}-saporin, a positive control (anti-CD33-saporin) or a negative control (anti-CD33 and free saporin).

[1347] Tumor burden may be monitored by bioluminescent imaging (BLI) weekly. Mice will be monitored for survival Bone marrow may be extracted from mice and tumor burden assessed using FACS.

[1348] It is expected that anti-CD33-saporin (positive control) will kill CD33+ targets independent of the CD33 genotype (CD33^{R69} or CD33^{G69}), reduce tumor burden, and prolong survival. Anti-CD33^{R69}-saporin is expected to kill CD33^{R69} targets (example KG1a), reduce tumor burden, and prolong survival of mice. Anti-CD33^{G69}-saporin would not be expected to kill CD33^{R69} targets and would not offer a survival advantage or reduce tumor burden.

### Example 16: Clinical Applications

[1349] Several clinical applications of polymorphically selective treatment of subjects are given below. In the examples below, the polymorphic antigen may be, e.g., CD33, FLT3, or CLL-1; for illustrative purposes, CD33 will be used.

[1350] Scenario 1: No prior screening, screen patients upon relapse. In this scenario, a subject with cancer, e.g. MDS or AML, is conditioned and transplanted with HSC from a related or unrelated histocompatible donor, whether from a human leukocyte antigen (HLA)-identical sibling, a HLA-matched donor, a cord blood unit, or a haploidentical donor, screened for a low probability of allorejection and graft-versus-host disease (GvHD). Most HSCT recipients eventually relapse. If relapse occurs, the subject becomes eligible for therapy with polymorphically selective treatment such as CAR-bearing immune effector cells (e.g., TCR-deleted CAR-T or CAR-NK or CAR-iNKT), or NK cells in combination with an antibody that induces ADCC) that target an antigen expressed on the surface of the subject's malignant cells.

[1351] If the subject relapses post-transplant, the subject is then genotyped using either a protein- (e.g. FACS) or DNA- (PCR) based approach to ensure the HSC donor and patient express different variants of the target antigen, e.g., CD33. If the subject and donor do express different variants of target antigen, e.g. one expresses CD33^{R69} and the other expresses CD33^{G69}, the subject is eligible for polymorphic treatment. The subject is then conditioned (e.g., cyclophosphamide/fludarabine, 3 days) and treated with CAR-bearing immune effector cells (e.g., TCR-deleted CAR-T or CAR-NK or CAR-iNKT), or NK cells in combination with an antibody that induces ADCC targeting the patient specific target antigen. For example, the patient whose cells express CD33^{R69} and whose HSCT graft expresses may be treated with CD33^{G69} may be treated with TCR-deleted CD33^{R69}-CART, or CD33^{R69}-CAR-NK, or donor NK cells in combination with an anti-CD33^{R69} antibody that induces ADCC. The CD33^{R69}-selective therapy will kill the subject's cancerous cells and spare the CD33^{G69}-expressing HSCT cells. The reverse mismatched combination would also be effective. The subject may then be monitored and, optionally, retreated with one or more of these selective therapies.

[1352] Scenario 2: Prospective screening, screen patients upon relapse. In this scenario, HSCT donors are prospectively screened to assess the donor's expression of a polymorphic variant of a given target antigen, e.g., CD33, and identify a donor who expresses a different variant than the prospective recipient subject. This can be done by genotyping patient and donor using a (PCR) based genotyping approach. At this time, both HSC and immune effector cells (such as T cells, NK cells, and iNKT cells) may be harvested from the same donor and separated via leukapheresis. The HSC may be used for transplant into the target-mismatched recipient; and the immune effector cells may be transduced with a CAR that selectively binds the variant of the antigen (e.g., CD33^{R69} or CD33^{G69}) expressed by the recipient's, but not the donor's cells, or stored for later use if needed.

[1353] The subject is conditioned and transplanted with HSC from a target-mismatched donor, e.g. a donor who expresses CD33^{G69} and for a patient who expresses CD33^{R69}, or the reverse. The donor may be a related or unrelated histocompatible donor as above.

[1354] If relapse occurs, the subject is conditioned (e.g., cyclophosphamide/fludarabine, 3 days) and treated with polymorphically selective treatment such as CAR-bearing immune effector cells (e.g., CAR-T, TCR-deleted CAR-T, CAR-NK, or CAR-iNKT), or NK cells in combination with an antibody that induces ADCC) that target the variant of the antigen expressed on the surface of the subject's malignant cells and not the variant expressed on the surface of the donor's cells. For example, the patient whose cells express CD33^{R69} and whose HSCT graft expresses may be treated with CD33^{G69} may be treated with TCR-deleted CD33^{R69}-CART, or CD33^{R69}-CAR-NK, or donor NK cells in combination with an anti-CD33^{R69} antibody that induces ADCC. The CD33^{R69}-selective therapy will kill the subject's CD33^{R69}-expressing cancerous cells and spare the CD33^{G69}-expressing HSCT cells. The reverse mismatched combination would also be effective. The subject may then be monitored and, optionally, retreated with one or more of these selective therapies.

[1355] Scenario 3: Prospective screening, treat patients upon relapse. In this scenario, HSCT donors are prospectively screened to assess the donor's expression of a polymorphic variant of a given target antigen, e.g., CD33, and identify a donor who expresses a different variant than the prospective recipient subject. This can be done by genotyping patient and donor using a (PCR) based genotyping approach.

[1356] The subject is conditioned and transplanted with HSC from a target-mismatched donor, e.g. a donor who expresses CD33^{G69} and for a patient who expresses CD33^{R69}, or the reverse. The donor may be a related or unrelated histocompatible donor as above. If relapse occurs, the subject is conditioned (e.g., cyclophosphamide/fludarabine, 3 days) and treated with polymorphically selective treatment such as CAR-bearing immune effector cells (e.g., TCR-deleted CAR-T or CAR-NK or CAR-iNKT), or NK cells in combination with an antibody that induces ADCC, or an antibody-drug conjugate comprising an antibody that induces ADCC, that target the variant of the antigen expressed on the surface of the subject's malignant cells and not the variant expressed on the surface of the donor's cells. For example, the patient whose cells express CD33^{R69} and whose HSCT graft expresses may be treated with CD33^{G69} may be treated with TCR-deleted CD33^{R69}-CART, or CD33^{R69}-CAR-NK, or donor NK cells in combination with an anti-CD33^{R69} antibody that induces ADCC. The CD33^{R69}-selective therapy will kill the subject's CD33^{R69}-expressing cancerous cells and spare the CD33^{G69}-expressing HSCT cells. The reverse mismatched combination would also be effective. The subject may then be monitored and, optionally, retreated with one or more of these selective therapies.

[1357] Scenario 4: Prospective screening, treat at time of transplant. In this scenario, HSCT donors are prospectively screened to assess the donor's expression of a polymorphic variant of a given target antigen, e.g., CD33, and identify a donor who expresses a different variant than the prospective recipient subject. This can be done by genotyping patient and donor using a (PCR) based genotyping approach.

[1358] The subject is conditioned and transplanted with HSC from a target-mismatched donor, e.g. a donor who expresses CD33^{G69} and for a patient who expresses CD33^{R69}, or the reverse. The donor may be a related or unrelated histocompatible donor as above. The conditioning may be as for standard HSCT (fully myeloablative), or reduced intensity conditioning (RIC); or alternatively, could be a T cell depleted transplant.

[1359] Nearly concurrently with transplant—that is, within 1 day, 2 days, 3 days, or 10 days, etc. of HSCT, but in any event, not requiring relapse—the subject is treated with polymorphically selective treatment such as CAR-bearing immune effector cells (e.g., CAR-T, TCR-deleted CAR-T, CAR-NK, or CAR-iNKT), or NK cells in combination with an antibody that induces ADCC) that target the variant of the antigen expressed on the surface of the subject's malignant cells and not the variant expressed on the surface of the donor's cells. For example, the patient whose cells express CD33^{R69} and whose HSCT graft expresses may be treated with CD33^{G69} may be treated with TCR-deleted CD33^{R69}-CART, or CD33^{R69}-CAR-NK, or donor NK cells in combination with an anti-CD33^{R69} antibody that induces ADCC. The CD33^{R69}-selective therapy will kill the subject's CD33^{R69}-expressing cancerous cells and spare the CD33^{G69}-expressing HSCT cells. The reverse mismatched combination would also be effective. The subject may then be monitored and, optionally, retreated with one or more of these selective therapies.

[1360] The foregoing methods may be adapted to demonstrate the binding and polymorphic selectivity of other scFvs, antibodies, antibody-drug conjugates, and CARs against antigens such as cancer antigens. For example, the methods are expected to demonstrate anti-FLT3 scFvs that selectively bind either the T227 or M227 variants. The methods are also expected to demonstrate anti-CLL-1 scFvs that selectively bind either the K244 or Q244 variant.

### Example 17: Identification of Non-Selective Anti-Human CD33 scFv Clones

[1361] The methods above in Example 1 have been used to discover polymorphically non-selective anti-human CD33 scFv clones.

TABLE 16a
Sequences of Non-Selective Anti-CD33 Polypeptides (CDR Sequences)

| Poly- | | SEQ | | SEQ | | SEQ | | SEQ | | SEQ | | SEQ |
|---|---|---|---|---|---|---|---|---|---|---|---|---|
| peptide | | ID | | ID | | ID | | ID | | ID | | ID |
| No. | HCDR1 | NO | HCDR2 | NO | HCDR3 | NO | LCDR1 | NO | LCDR2 | NO | LCDR3 | NO |
| 89 | YTFTN | 705 | GWINP | 760 | CARDD | 815 | RASQG | 870 | SASNL | 925 | CQQSF | 980 |
| | YYMH | | NSGDT | | RIQLW | | ISNYLA | | QS | | STPFT | |
| | | | NYE | | VPLVF | | | | | | F | |
| | | | | | W | | | | | | | |
| 90 | FTFSNS | 706 | SYISGT | 761 | CAKDY | 816 | RASQSI | 871 | AASNL | 926 | CQQYG | 981 |
| | DMN | | GSTIY | | DSSYG | | YNYLN | | QS | | NAPLT | |
| | | | YA | | SGYYG | | | | | | F | |
| | | | | | MDVW | | | | | | | |
| 91 | GTFSS | 707 | GWMN | 762 | CARED | 817 | QASHD | 872 | DASNL | 927 | CQQAY | 982 |
| | YAIS | | PNSGN | | YYDSS | | INIHLN | | ET | | SLPWT | |
| | | | TGYA | | GNFDY | | | | | | F | |
| | | | | | W | | | | | | | |
| 92 | YTFTN | 708 | GIINPS | 763 | CASAE | 818 | RSSQS | 873 | AASSL | 928 | CMQAL | 983 |
| | HYMH | | GGSTS | | VGATH | | LLHSN | | QS | | HPPTF | |
| | | | YA | | YGMD | | GYNYL | | | | | |
| | | | | | VW | | D | | | | | |
| 93 | YSFTN | 709 | GWVN | 764 | CAKDA | 819 | RSSQS | 874 | AASSL | 929 | CMQAL | 984 |
| | YDIS | | PNSGN | | PYYYD | | LLHSN | | QS | | QTPLT | |
| | | | TGYA | | SSGYY | | GYNYL | | | | F | |
| | | | | | GVFDY | | D | | | | | |
| | | | | | W | | | | | | | |
| 94 | YTFTT | 710 | GWISG | 765 | CAKD | 820 | RSSQS | 875 | AASTL | 930 | CMQAL | 985 |
| | YDIN | | YNGNT | | MGYG | | LLHSN | | QS | | QIPIT | |
| | | | GYA | | DYPDA | | GYNYL | | | | F | |
| | | | | | FDIW | | D | | | | | |
| 95 | YSFTT | 711 | GRMNP | 766 | CARVV | 821 | RSSQS | 876 | LGSLR | 931 | CMQAL | 986 |
| | YDIN | | NSGNT | | HGMD | | LLHSN | | AP | | QTPWT | |
| | | | GYA | | VW | | GYNYL | | | | F | |
| | | | | | | | D | | | | | |
| 96 | GTFSS | 712 | GWMN | 767 | CAKDE | 822 | RASQSI | 877 | GVSTL | 932 | CQQSY | 987 |
| | YAIS | | PSSAN | | MELLT | | GSWLA | | HS | | STPPT | |
| | | | TGYA | | AFDIW | | | | | | F | |
| 97 | FTFRS | 713 | SVISGS | 768 | CARET | 823 | RASQSI | 878 | DASNL | 933 | CQQSSI | 988 |
| | YWMT | | GDNTY | | TWGM | | SSYLN | | ET | | IPLTF | |
| | | | YA | | DVW | | | | | | | |
| 98 | GSFSSS | 714 | GWMN | 769 | CARDR | 824 | RASQD | 879 | AASSL | 934 | CHQSY | 989 |
| | AIN | | PNSGN | | GIAVA | | IGSYLA | | QS | | STPFT | |
| | | | TGYA | | GASPY | | | | | | F | |
| | | | | | YYYG | | | | | | | |
| | | | | | MDVW | | | | | | | |
| 99 | YTFSD | 715 | GWMN | 770 | CARTH | 825 | RASQG | 880 | QASNK | 935 | CQQSY | 990 |
| | YHIH | | PNSGN | | SSGYY | | ISNNLN | | DT | | SSPPT | |
| | | | TGYA | | YWFDP | | | | | | F | |
| | | | | | W | | | | | | | |
| 100 | ATRSW | 716 | GIINPS | 771 | CAKEP | 826 | RASQSI | 881 | GASSL | 936 | CQQSY | 991 |
| | MH | | GDSTS | | YSSSP | | SSWLA | | QS | | TTPITF | |
| | | | YA | | YYFDY | | | | | | | |
| | | | | | W | | | | | | | |
| 101 | FTFSSY | 717 | SAISGD | 772 | CARDT | 827 | RASQN | 882 | AASTL | 937 | CQQYD | 992 |
| | GVH | | GGDTY | | WDYS | | INTFLN | | QS | | SFPLTF | |
| | | | YA | | NYGGI | | | | | | | |
| | | | | | DYW | | | | | | | |
| 102 | FTFSN | 718 | SGIGGS | 773 | CAREV | 828 | RSSQS | 883 | LGSNR | 938 | CMQAL | 993 |
| | | | GGTIY | | AAPLH | | LLHSN | | AS | | ETPITF | |
| | AWMS | | YA | | PFGYY | | GYNYL | | | | | |
| | | | | | YYMD | | D | | | | | |
| | | | | | VW | | | | | | | |
| 103 | YTFTG | 719 | GWMN | 774 | CATTR | 829 | RSSQS | 884 | LGSNR | 939 | CMQAT | 994 |
| | YYMH | | PDSGD | | QPHYG | | LLHSN | | AS | | HWPTF | |
| | | | TNYA | | MDVW | | GYNYL | | | | | |
| | | | | | | | D | | | | | |
| 104 | FTFSSS | 720 | AVISY | 775 | CARLT | 830 | RASQG | 885 | AASSL | 940 | CQQSY | 995 |
| | WMH | | DGSEE | | DYGDY | | ISSYLA | | QS | | SIPPTF | |
| | | | YYA | | VLGRY | | | | | | | |
| | | | | | LSDW | | | | | | | |
| 105 | FTFNN | 721 | AVISY | 776 | CARM | 831 | RASQSI | 886 | AASTL | 941 | CQQTY | 996 |
| | AWMT | | DGSNK | | AVAGK | | YSWLA | | QS | | STPVTF | |
| | | | YYA | | GAFDI | | | | | | | |
| | | | | | W | | | | | | | |
| 106 | YTFTG | 722 | GRIKP | 777 | CARGA | 832 | RASQSI | 887 | AASSL | 942 | CQQYG | 997 |
| | YYMH | | NSGGT | | YSGSY | | SWFLN | | QN | | SFPPTF | |
| | | | DYA | | YGPIE | | | | | | | |
| | | | | | YFQH | | | | | | | |
| | | | | | W | | | | | | | |
| 107 | YTFTD | 723 | GGIIPIF | 778 | CAREP | 833 | QASQD | 888 | AASTL | 943 | CQQSY | 998 |
| | YYIH | | GTANY | | LWFGE | | ISNYLN | | QS | | SSPPTF | |
| | | | A | | SSPHD | | | | | | | |
| | | | | | YYGM | | | | | | | |
| | | | | | DVW | | | | | | | |
| 108 | YTFTN | 724 | GWMN | 779 | CARG | 834 | RSSQS | 889 | WASTR | 944 | CQQYY | 999 |
| | YDIN | | PNSGN | | WGHG | | LLYSS | | ES | | SNPLTF | |
| | | | TGLV | | YGDYK | | NNLNY | | | | | |
| | | | | | FDYW | | LA | | | | | |
| 109 | YTFTT | 725 | GWMN | 780 | CAREG | 835 | RASQSI | 890 | GASTR | 945 | CQQYE | 1000 |
| | YGIS | | PNSGN | | GDGDY | | SSSSLA | | AT | | TAPYT | |
| | | | TGYA | | PDYW | | | | | | F | |
| 110 | YTFTD | 726 | GWMN | 781 | CARDF | 836 | RASQRI | 891 | AASSL | 946 | CQQSY | 1001 |
| | YYVH | | PNSGN | | IWVEG | | GNWL | | QS | | STPLTF | |
| | | | TGYA | | YLASP | | A | | | | | |
| | | | | | PPRFD | | | | | | | |
| | | | | | YW | | | | | | | |
| 111 | GTFTS | 727 | GWINP | 782 | CANEQ | 837 | RASQS | 892 | GASTR | 947 | CQQYY | 1002 |
| | YGIS | | NTGVT | | GGFDY | | VAGSY | | AT | | STPLTF | |
| | | | NYA | | W | | LA | | | | | |
| 112 | STLTG | 728 | GGIIPF | 783 | CARGG | 838 | RSSESI | 893 | SASTL | 948 | CQQSY | 1003 |
| | YDIH | | LGTAS | | GSGYD | | SSWLA | | QS | | STPVTF | |
| | | | YA | | LDYW | | | | | | | |
| 113 | GTFSS | 729 | GGLIP | 784 | CATGL | 839 | RASQG | 894 | AASTL | 949 | CQQTY | 1004 |
| | YDIN | | VFGTT | | GVTTS | | IRNDIG | | QS | | MMPYT | |
| | | | HYA | | NYYYG | | | | | | F | |
| | | | | | MDVW | | | | | | | |
| 114 | GTFSK | 730 | GWMN | 785 | CARDQ | 840 | RASQSI | 895 | KASSL | 950 | CQQSY | 1005 |
| | YAIS | | PNSGN | | GLTGY | | GNWL | | ES | | NTPPTF | |
| | | | TGYA | | FDLW | | A | | | | | |
| 115 | YTFTG | 731 | GIISPS | 786 | CAREG | 841 | RSSQS | 896 | LGSNR | 951 | CMQAL | 1006 |
| | YYMH | | GGSPT | | NGGM | | LLHSN | | AS | | QTPYT | |
| | | | YA | | DVW | | GYNYL | | | | F | |
| | | | | | | | D | | | | | |
| 116 | FTFSN | 732 | SAISGS | 787 | CAREG | 842 | RASQSI | 897 | ATSRL | 952 | CQQGF | 1007 |
| | YAMA | | GGGTY | | GYDPD | | SSYLN | | QS | | NFPPTF | |
| | | | YA | | YYYYG | | | | | | | |
| | | | | | MDVW | | | | | | | |
| 117 | FTFGD | 733 | AGISY | 788 | CARDR | 843 | RASQTI | 898 | DASSL | 953 | CQQSY | 1008 |
| | YPMS | | DGLNE | | DSGPS | | GTWLA | | ES | | STPPTF | |
| | | | HYA | | GFQH | | | | | | | |
| | | | | | W | | | | | | | |
| 118 | FTISNA | 734 | AHIWN | 789 | CARDG | 844 | RSSQS | 899 | AASSL | 954 | CMQGL | 1009 |
| | WMS | | DGSQK | | ALGVG | | LLHSN | | QS | | QTPHT | |
| | | | YYA | | PDDY | | GYNYL | | | | F | |
| | | | | | W | | D | | | | | |
| 119 | NTLTN | 735 | GWMN | 790 | CARAG | 845 | RSSQS | 900 | MGSNR | 955 | CMQAL | 1010 |
| | DHIH | | PNSGD | | VDTA | | LLHSN | | AS | | ETPTF | |
| | | | TGYA | | MVTY | | GYNYL | | | | | |
| | | | | | YYYG | | D | | | | | |
| | | | | | MDVW | | | | | | | |
| 120 | YTFTT | 736 | GWMN | 791 | CARGH | 846 | RASQSI | 901 | AISTLQ | 956 | CQQSY | 1011 |
| | YYMH | | PNSGN | | KVDSG | | GTYLH | | N | | SPPLTF | |
| | | | TGYA | | YDPYG | | | | | | | |
| | | | | | MDVW | | | | | | | |
| 121 | DSFTD | 737 | GWMN | 792 | CARDR | 847 | RASQN | 902 | AASTL | 957 | CQQSY | 1012 |
| | YYIH | | PNSGN | | EYSSSS | | IGNWL | | QS | | NSITF | |
| | | | TGYA | | RYFDL | | A | | | | | |
| | | | | | W | | | | | | | |
| 122 | YTFTD | 738 | GTINPS | 793 | CAKEE | 848 | RASQSI | 903 | AASSL | 958 | CQQSY | 1013 |
| | YWLH | | GGSTS | | EGFWS | | SSYLN | | QS | | STPLTF | |
| | | | YS | | GYAFD | | | | | | | |
| | | | | | YW | | | | | | | |
| 123 | FILGNA | 739 | ASVSG | 794 | CARDT | 849 | QASQD | 904 | AASNL | 959 | CQQTY | 1014 |
| | WMH | | DGSDE | | HDYGD | | INNYL | | QS | | SFPLTF | |
| | | | NYA | | YAPFD | | N | | | | | |
| | | | | | YW | | | | | | | |
| 124 | FTFSSY | 740 | AVIWY | 795 | CVRDG | 850 | RASQS | 905 | GASTR | 960 | CQQYY | 1015 |
| | WMH | | DGSNK | | ARSGM | | VSTYV | | AT | | DTPLTF | |
| | | | YYA | | DVW | | A | | | | | |
| 125 | YSFTT | 741 | GWMN | 796 | CATDH | 851 | QASQD | 906 | AASTL | 96 | CQQYS | 1016 |
| | YDIH | | PNSGN | | WVLG | | ISNYLN | | QS | | YLPVT | |
| | | | TGYA | | GFDY | | | | | | F | |
| | | | | | W | | | | | | | |
| 126 | FTFTTY | 742 | AGINW | 797 | CAKDL | 852 | RASQSI | 907 | AASSL | 962 | CQQSD | 1017 |
| | DMH | | NSVIID | | LYYYD | | STWLA | | QS | | TLPLTF | |
| | | | YA | | SIGAFD | | | | | | | |
| | | | | | IW | | | | | | | |
| 127 | YTFTN | 743 | GMINP | 798 | CARGR | 853 | QASQD | 908 | GASTL | 963 | CQQSY | 1018 |
| | HHMH | | SGGST | | PVDIV | | IRNFLN | | HS | | STPLTF | |
| | | | SYA | | ATYYF | | | | | | | |
| | | | | | DYW | | | | | | | |
| 128 | YTFTN | 744 | GWTNP | 799 | CAKEG | 854 | RASQG | 909 | AASSL | 964 | CQQSY | 1019 |
| | YYIH | | INGDT | | QLAW | | ISSALA | | QS | | STPLTF | |
| | | | GSA | | ADYYY | | | | | | | |
| | | | | | YMDV | | | | | | | |
| | | | | | W | | | | | | | |
| 129 | FSLRN | 745 | SGISGS | 800 | CARDY | 855 | RASQSI | 910 | AASSL | 965 | CQQSY | 1020 |
| | YWMH | | GGSTY | | TGVVD | | SSYLN | | QS | | STPLTF | |
| | | | YA | | YW | | | | | | | |
| 130 | GTFSN | 746 | AWMN | 801 | CARDG | 856 | RASQSI | 911 | GATRL | 966 | CQQSY | 1021 |
| | YAIS | | PNSGN | | FIGFGE | | GTWLA | | LS | | STPPTF | |
| | | | TGYA | | LFSAF | | | | | | | |
| | | | | | DIW | | | | | | | |
| 131 | GTFSN | 747 | GWINP | 802 | CARDS | 857 | QASQD | 912 | GASTL | 967 | CQQAY | 1022 |
| | YAIN | | NSGGT | | SLALS | | ISDHLN | | QS | | SFPWT | |
| | | | DSA | | YGGNS | | | | | | F | |
| | | | | | EYYYG | | | | | | | |
| | | | | | MDVW | | | | | | | |
| 132 | FTFNN | 748 | SAISGS | 803 | CAREY | 858 | RASQS | 913 | GASTR | 968 | CQQYG | 1023 |
| | YGMH | | GGSTY | | MQQPH | | VNSYL | | AT | | SSPLSF | |
| | | | YA | | GGMD | | A | | | | | |
| | | | | | VW | | | | | | | |
| 133 | FTFSSS | 749 | SAISSS | 804 | CAKFS | 859 | RASQG | 914 | TASSL | 969 | CQQYD | 1024 |
| | WMH | | GDATY | | DGGAG | | ISSYLA | | QS | | NLPITF | |
| | | | YA | | DSDY | | | | | | | |
| | | | | | W | | | | | | | |
| 134 | YTFDS | 750 | GMINP | 805 | CAKEG | 860 | RASQSI | 915 | AASSL | 970 | CQQSY | 1025 |
| | YLLH | | SGAGT | | SIAAG | | DSWLA | | QS | | TTPITF | |
| | | | TYA | | YYFDS | | | | | | | |
| | | | | | W | | | | | | | |
| 135 | YSFTT | 751 | GWINP | 806 | CASDL | 861 | KSSQS | 916 | WASTR | 97 | CQQYY | 1026 |
| | | | NSGNA | | AGYSS | | VLYGS | | | | | |
| | YGIT | | GYA | | GYFDL | | NNKNY | | ES | | STPLTF | |
| | | | | | W | | LA | | | | | |
| 136 | DTLTN | 752 | GWMN | 807 | CARDP | 862 | RASQRI | 917 | AASSL | 972 | CQQSY | 1027 |
| | HFVH | | PNSGN | | QMGA | | GNWL | | QS | | SPPLTF | |
| | | | TGYA | | VAGGF | | A | | | | | |
| | | | | | DYW | | | | | | | |
| 137 | YTFTD | 753 | GMVNP | 808 | CAKDS | 863 | RASQG | 918 | DASNL | 973 | CQQSY | 1028 |
| | YYIH | | SGGSA | | AWQEP | | ISSYLA | | DT | | STPLTF | |
| | | | NYA | | YYFDY | | | | | | | |
| | | | | | W | | | | | | | |
| 138 | YTFSS | 754 | GVINP | 809 | CARDE | 864 | RASQS | 919 | GASTR | 974 | CQQSH | 1029 |
| | YDMH | | GGGYT | | GWELL | | VGSNL | | AT | | SLPPTF | |
| | | | NYA | | LDYW | | A | | | | | |
| 139 | YTLSD | 755 | GWMN | 810 | CERDQ | 865 | RASQG | 920 | AASSL | 975 | CQQSY | 1030 |
| | HDIN | | PSTGN | | LRFGA | | IRNYL | | QS | | SIPLTF | |
| | | | TGYA | | WFDP | | A | | | | | |
| | | | | | W | | | | | | | |
| 140 | ITVSSS | 756 | SAIGT | 811 | CARDQ | 866 | RASQSI | 921 | DASTL | 976 | CQQSY | 1031 |
| | WMH | | GGGTH | | GGQID | | SSWLA | | QS | | SIPLTF | |
| | | | YA | | HW | | | | | | | |
| 141 | GTFSS | 757 | GVISPN | 812 | CARDR | 867 | RASQSI | 922 | AASSL | 977 | CQQSY | 1032 |
| | YAIS | | GDTTV | | GVAHS | | SSYLN | | HS | | SPPITF | |
| | | | YA | | YYYG | | | | | | | |
| | | | | | MDVW | | | | | | | |
| 142 | FTFSSY | 758 | AVISY | 813 | CARGL | 868 | RASQSI | 923 | AASSL | 978 | CQQSY | 1033 |
| | WMH | | DGSDK | | GGTTG | | SSYLN | | QS | | STPLTF | |
| | | | YYA | | TADFD | | | | | | | |
| | | | | | YW | | | | | | | |
| 143 | YTFTG | 759 | GWMN | 814 | CARDS | 869 | RASQSI | 924 | AASSL | 979 | CQQSY | 1034 |
| | YYMH | | ANSGN | | SSWLS | | GTYLS | | QS | | SSPITF | |
| | | | TGFA | | GGGW | | | | | | | |
| | | | | | FDPW | | | | | | | |
| 191 | GTFSS | 1979 | GWMN | 1982 | CARED | 1985 | QASHD | 1988 | DASNL | 1991 | CQQAY | 1994 |
| | YAIS | | PNSGN | | YYDSS | | INIHLN | | ET | | SLPWT | |
| | | | TGYA | | GNFDY | | | | | | F | |
| | | | | | W | | | | | | | |
| 192 | YTFTN | 1980 | GWINP | 1983 | CARDD | 1986 | RASQG | 1989 | SASNL | 1992 | CQQSF | 1995 |
| | YYMH | | NSGDT | | RIQLW | | ISNYLA | | QS | | STPFTF | |
| | | | NYE | | VPLVF | | | | | | | |
| | | | | | W | | | | | | | |
| 193 | FTFSNS | 1981 | SYISGT | 1984 | CAKDY | 1987 | RASQSI | 1990 | AASNL | 1993 | CQQYG | 1996 |
| | | | GSTIY | | DSSYG | | YNYLN | | QS | | NAPLT | |
| | DMN | | YA | | SGYYG | | | | | | F | |
| | | | | | MDVW | | | | | | | |

TABLE 16b
Sequences of Non-Selective Anti-CD33 Polypeptides
(VH and VL Sequences)

| Polypeptide | | SEQ ID | | SEQ ID |
|---|---|---|---|---|
| No. | Full VH | NO | Full VL | NO |
| 89 | QVQLVQSGAEVKKPGASVKV | 1035 | DIQMTQSPSSLSASVGDRVTI | 1090 |
| | SCKASGYTFTNYYMHWVRQA | | TCRASQGISNYLAWYQQKPG | |
| | PGQGLEWMGWINPNSGDTNY | | KAPKLLIYSASNLQSGVPSRF | |
| | EQKFQGRVTMTRDTSTSTVY | | SGSGSGTDFTLTISSLQPEDFA | |
| | MELSSLRSEDTAVYYCARDD | | TYYCQQSFSTPFTFGQGTKLE | |
| | RIQLWVPLVFWGQGTLVTVSS | | IKR | |
| 90 | EVQLLESGGGLVQPGGSLRLS | 1036 | DIQMTQSPSSLSASVGDRVTI | 1091 |
| | CAASGFTFSNSDMNWVRQAP | | TCRASQSIYNYLNWYQQKPG | |
| | GKGLEWVSYISGTGSTIYYAD | | KAPKLLIYAASNLQSGVPSRF | |
| | SVKGRFTISRDNSKNTLYLQM | | SGSGSGTDFTLTISSLQPEDFA | |
| | [sequence omitted] | | TYYCQQYGNAPLTFGQGTKV | |
| | YGSGYYGMDVWGQGTTVTV | | EIKR | |
| | SS | | | |
| 91 | QVQLVQSGAEVKKPGASVKV | 1037 | DIQMTQSPSSLSASVGDRVTI | 1092 |
| | SCKASGGTFSSYAISWVRQAP | | TCQASHDINIHLNWYQQKPG | |
| | GQGLEWMGWMNPNSGNTGY | | KAPKLLIYDASNLETGVPSRF | |
| | AQKFQGRVTMTRDTSTSTVY | | SGSGSGTDFTLTISSLQPEDFA | |
| | MELSSLRSEDTAVYYCAREDY | | TYYCQQAYSLPWTFGQGTKV | |
| | YDSSGNFDYWGQGTLVTVSS | | EIKR | |
| 92 | QVQLVQSGAEVKKPGASVKV | 1038 | DIVMTQSPLSLPVTPGEPASIS | 1093 |
| | SCKASGYTFTNHYMHWVRQA | | CRSSQSLLHSNGYNYLDWYL | |
| | PGQGLEWMGIINPSGGSTSYA | | QKPGQSPQLLIYAASSLQSGV | |
| | QKFQGRVTMTRDTSTSTVYM | | PDRFSGSGSGTDFTLKISRVE | |
| | ELSSLRSEDTAVYYCASAEVG | | AEDVGVYYCMQALHPPTFG | |
| | ATHYGMDVWGQGTTVTVSS | | QGTKVEIKR | |
| 93 | QVQLVQSGAEVKKPGASVKV | 1039 | DIVMTQSPLSLPVTPGEPASIS | 1094 |
| | SCKASGYSFTNYDISWVRQAP | | CRSSQSLLHSNGYNYLDWYL | |
| | GQGLEWMGWVNPNSGNTGY | | QKPGQSPQLLIYAASSLQSGV | |
| | AQKFQGRVTMTRDTSTSTVY | | PDRFSGSGSGTDFTLKISRVE | |
| | MELSSLRSEDTAVYYCAKDAP | | AEDVGVYYCMQALQTPLTFG | |
| | YYYDSSGYYGVFDYWGQGTL | | QGTRLEIKR | |
| | VTVSS | | | |
| 94 | QVQLVQSGAEVKKPGASVKV | 1040 | DIVMTQSPLSLPVTPGEPASIS | 1095 |
| | SCKASGYTFTTYDINWVRQAP | | CRSSQSLLHSNGYNYLDWYL | |
| | GQGLEWMGWISGYNGNTGY | | QKPGQSPQLLIYAASTLQSGV | |
| | AQKFQGRVTMTRDTSTSTVY | | PDRFSGSGSGTDFTLKISRVE | |
| | MELSSLRSEDTAVYYCAKDM | | AEDVGVYYCMQALQIPITFG | |
| | GYGDYPDAFDIWGQGTMVTV | | QGTKVEIKR | |
| | SS | | | |
| 95 | QVQLVQSGAEVKKPGSSVKV | 1041 | DIVMTQSPLSLPVTPGEPASIS | 1096 |
| | SCKASGYSFTTYDINWVRQAP | | CRSSQSLLHSNGYNYLDWYL | |
| | GQGLEWMGRMNPNSGNTGY | | QKPGQSPQLLIYLGSLRAPGV | |
| | AQKFQGRVTITADESTSTAYM | | PDRFSGSGSGTDFTLKISRVE | |
| | ELSSLRSEDTAVYYCARVVHG | | AEDVGVYYCMQALQTPWTF | |
| | MDVWGQGTTVTVSS | | GQGTKVEIKR | |
| 96 | QVQLVQSGAEVKKPGASVKV | 1042 | DIQMTQSPSSLSASVGDRVTI | 1097 |
| | SCKASGGTFSSYAISWVRQAP | | TCRASQSIGSWLAWYQQKPG | |
| | GQGLEWMGWMNPSSANTGY | | KAPKLLIYGVSTLHSGVPSRF | |
| | AQKFQGRVTMTRDTSTSTVY | | SGSGSGTDFTLTISSLQPEDFA | |
| | MELSSLRSEDTAVYYCAKDE | | TYYCQQSYSTPPTFGQGTKLE | |
| | MELLTAFDIWGQGTMVTVSS | | IKR | |
| 97 | EVQLLESGGGLVQPGGSLRLS | 1043 | DIQMTQSPSSLSASVGDRVTI | 1098 |
| | CAASGFTFRSYWMTWVRQAP | | TCRASQSISSYLNWYQQKPG | |
| | GKGLEWVSVISGSGDNTYYA | | KAPKLLIYDASNLETGVPSRF | |
| | DSVKGRFTISRDNSKNTLYLQ | | SGSGSGTDFTLTISSLQPEDFA | |
| | MNSLRAEDTAVYYCARETTW | | TYYCQQSSIIPLTFGGGTKVEI | |
| | GMDVWGQGTTVTVSS | | KR | |
| 98 | QVQLVQSGAEVKKPGASVKV | 1044 | DIQMTQSPSSLSASVGDRVTI | 1099 |
| | SCKASGGSFSSSAINWVRQAP | | TCRASQDIGSYLAWYQQKPG | |
| | GQGLEWMGWMNPNSGNTGY | | KAPKLLIYAASSLQSGVPSRF | |
| | AQKFQGRVTMTRDTSTSTVY | | SGSGSGTDFTLTISSLQPEDFA | |
| | MELSSLRSEDTAVYYCARDR | | TYYCHQSYSTPFTFGQGTKLE | |
| | GIAVAGASPYYYYGMDVWG | | IKR | |
| | QGTTVTVSS | | | |
| 99 | QVQLVQSGAEVKKPGSSVKV | 1045 | DIQMTQSPSSLSASVGDRVTI | 1100 |
| | SCKASGYTFSDYHIHWVRQAP | | TCRASQGISNNLNWYQQKPG | |
| | GQGLEWMGWMNPNSGNTGY | | KAPKLLIYQASNKDTGVPSRF | |
| | AQKFQGRVTITADESTSTAYM | | SGSGSGTDFTLTISSLQPEDFA | |
| | ELSSLRSEDTAVYYCARTHSS | | TYYCQQSYSSPPTFGQGTKVE | |
| | GYYYWFDPWGQGTLVTVSS | | IKR | |
| 100 | QVQLVQSGAEVKKPGASVKV | 1046 | DIQMTQSPSSLSASVGDRVTI | 1101 |
| | SCKASGATRSWMHWVRQAP | | TCRASQSISSWLAWYQQKPG | |
| | GQGLEWMGIINPSGDSTSYAQ | | KAPKLLIYGASSLQSGVPSRF | |
| | KFQGRVTMTRDTSTSTVYME | | SGSGSGTDFTLTISSLQPEDFA | |
| | LSSLRSEDTAVYYCAKEPYSS | | TYYCQQSYTTPITFGQGTRLE | |
| | SPYYFDYWGQGTLVTVSS | | IKR | |
| 101 | EVQLLESGGGLVQPGGSLRLS | 1047 | DIQMTQSPSSLSASVGDRVTI | 1102 |
| | CAASGFTFSSYGVHWVRQAP | | TCRASQNINTFLNWYQQKPG | |
| | GKGLEWVSAISGDGGDTYYA | | KAPKLLIYAASTLQSGVPSRF | |
| | DSVKGRFTISRDNSKNTLYLQ | | SGSGSGTDFTLTISSLQPEDFA | |
| | MNSLRAEDTAVYYCARDTW | | TYYCQQYDSFPLTFGGGTKV | |
| | DYSNYGGIDYWGQGTLVTVS | | EIKR | |
| | S | | | |
| 102 | EVQLLESGGGLVQPGGSLRLS | 1048 | DIVMTQSPLSLPVTPGEPASIS | 1103 |
| | CAASGFTFSNAWMSWVRQAP | | CRSSQSLLHSNGYNYLDWYL | |
| | GKGLEWVSGIGGSGGTIYYAD | | QKPGQSPQLLIYLGSNRASGV | |
| | SVKGRFTISRDNSKNTLYLQM | | PDRFSGSGSGTDFTLKISRVE | |
| | NSLRAEDTAVYYCAREVAAP | | AEDVGVYYCMQALETPITFG | |
| | LHPFGYYYYMDVWGKGTTV | | QGTRLEIKR | |
| | TVSS | | | |
| 103 | QVQLVQSGAEVKKPGASVKV | 1049 | DIVMTQSPLSLPVTPGEPASIS | 1104 |
| | SCKASGYTFTGYYMHWVRQA | | CRSSQSLLHSNGYNYLDWYL | |
| | PGQGLEWMGWMNPDSGDTN | | QKPGQSPQLLIYLGSNRASGV | |
| | YAQNFQGRVTMTRDTSTSTV | | PDRFSGSGSGTDFTLKISRVE | |
| | YMELSSLRSEDTAVYYCATTR | | AEDVGVYYCMQATHWPTFG | |
| | QPHYGMDVWGQGTTVTVSS | | QGTRLEIKR | |
| 104 | EVQLLESGGGLVQPGGSLRLS | 1050 | DIQMTQSPSSLSASVGDRVTI | 1105 |
| | CAASGFTFSSSWMHWVRQAP | | TCRASQGISSYLAWYQQKPG | |
| | GKGLEWVAVISYDGSEEYYA | | KAPKLLIYAASSLQSGVPSRF | |
| | DSVKGRFTISRDNSKNTLYLQ | | SGSGSGTDFTLTISSLQPEDFA | |
| | MNSLRAEDTAVYYCARLTDY | | TYYCQQSYSIPPTFGQGTKLEI | |
| | GDYVLGRYLSDWGQGTLVTV | | KR | |
| | SS | | | |
| 105 | EVQLLESGGGLVQPGGSLRLS | 1051 | DIQMTQSPSSLSASVGDRVTI | 1106 |
| | CAASGFTFNNAWMTWVRQA | | TCRASQSIYSWLAWYQQKPG | |
| | PGKGLEWVAVISYDGSNKYY | | KAPKLLIYAASTLQSGVPSRF | |
| | ADSVKGRFTISRDNSKNTLYL | | SGSGSGTDFTLTISSLQPEDFA | |
| | QMNSLRAEDTAVYYCARMA | | TYYCQQTYSTPVTFGQGTKV | |
| | VAGKGAFDIWGQGTMVTVSS | | EIKR | |
| 106 | QVQLVQSGAEVKKPGASVKV | 1052 | DIQMTQSPSSLSASVGDRVTI | 1107 |
| | SCKASGYTFTGYYMHWVRQA | | TCRASQSISWFLNWYQQKPG | |
| | PGQGLEWMGRIKPNSGGTDY | | KAPKLLIYAASSLQNGVPSRF | |
| | AQKFQGRVTMTRDTSTSTVY | | SGSGSGTDFTLTISSLQPEDFA | |
| | MELSSLRSEDTAVYYCARGA | | TYYCQQYGSFPPTFGGGTKV | |
| | YSGSYYGPIEYFQHWGQGTLV | | EIKR | |
| | TVSS | | | |
| 107 | QVQLVQSGAEVKKPGSSVKV | 1053 | DIQMTQSPSSLSASVGDRVTI | 1108 |
| | SCKASGYTFTDYYIHWVRQAP | | TCQASQDISNYLNWYQQKPG | |
| | GQGLEWMGGIIPIFGTANYAQ | | KAPKLLIYAASTLQSGVPSRF | |
| | KFQGRVTITADESTSTAYMEL | | SGSGSGTDFTLTISSLQPEDFA | |
| | SSLRSEDTAVYYCAREPLWFG | | TYYCQQSYSSPPTFGQGTKVE | |
| | ESSPHDYYGMDVWGQGTLVT | | IKR | |
| | VSS | | | |
| 108 | QVQLVQSGAEVKKPGASVKV | 1054 | DIVMTQSPDSLAVSLGERATI | 1109 |
| | SCKASGYTFTNYDINWVRQAP | | NCRSSQSLLYSSNNLNYLAW | |
| | GQGLEWMGWMNPNSGNTGL | | YQQKPGQPPKLLIYWASTRES | |
| | VEKFQGRVTMTRDTSTSTVY | | GVPDRFSGSGSGTDFTLTISSL | |
| | MELSSLRSEDTAVYYCARGW | | QAEDVAVYYCQQYYSNPLTF | |
| | GHGYGDYKFDYWGQGTLVT | | GQGTKVEIKR | |
| | VSS | | | |
| 109 | QVQLVQSGAEVKKPGSSVKV | 1055 | EIVMTQSPATLSVSPGERATL | 1110 |
| | SCKASGYTFTTYGISWVRQAP | | SCRASQSISSSSLAWYQQKPG | |
| | GQGLEWMGWMNPNSGNTGY | | QAPRLLIYGASTRATGIPARFS | |
| | AQKFQGRVTITADESTSTAYM | | GSGSGTEFTLTISSLQSEDFAV | |
| | ELSSLRSEDTAVYYCAREGGD | | YYCQQYETAPYTFGQGTKLE | |
| | GDYPDYWGQGTLVTVSS | | IKR | |
| 110 | QVQLVQSGAEVKKPGASVKV | 1056 | DIQMTQSPSSLSASVGDRVTI | 1111 |
| | SCKASGYTFTDYYVHWVRQA | | TCRASQRIGNWLAWYQQKP | |
| | PGQGLEWMGWMNPNSGNTG | | GKAPKLLIYAASSLQSGVPSR | |
| | YAQKFQGRVTMTRDTSTSTV | | FSGSGSGTDFTLTISSLQPEDF | |
| | YMELSSLRSEDTAVYYCARDF | | ATYYCQQSYSTPLTFGQGTK | |
| | IWVEGYLASPPPRFDYWGQGT | | LEIKR | |
| | LVTVSS | | | |
| 111 | QVQLVQSGAEVKKPGASVKV | 1057 | EIVMTQSPATLSVSPGERATL | 1112 |
| | SCKASGGTFTSYGISWVRQAP | | SCRASQSVAGSYLAWYQQKP | |
| | GQGLEWMGWINPNTGVTNY | | GQAPRLLIYGASTRATGIPAR | |
| | AQDFQGRVTMTRDTSTSTVY | | FSGSGSGTEFTLTISSLQSEDF | |
| | MELSSLRSEDTAVYYCANEQ | | AVYYCQQYYSTPLTFGGGTK | |
| | GGFDYWGQGTLVTVSS | | VEIKR | |
| 112 | QVQLVQSGAEVKKPGSSVKV | 1058 | DIQMTQSPSSLSASVGDRVTI | 1113 |
| | SCKASGSTLTGYDIHWVRQAP | | TCRSSESISSWLAWYQQKPG | |
| | GQGLEWMGGIIPFLGTASYAQ | | KAPKLLIYSASTLQSGVPSRFS | |
| | EFQGRVTITADESTSTAYMEL | | GSGSGTDFTLTISSLQPEDFAT | |
| | SSLRSEDTAVYYCARGGGSGY | | YYCQQSYSTPVTFGQGTRLEI | |
| | DLDYWGQGTLVTVSS | | KR | |
| 113 | QVQLVQSGAEVKKPGSSVKV | 1059 | DIQMTQSPSSLSASVGDRVTI | 1114 |
| | SCKASGGTFSSYDINWVRQAP | | TCRASQGIRNDIGWYQQKPG | |
| | GQGLEWMGGLIPVFGTTHYA | | KAPKLLIYAASTLQSGVPSRF | |
| | QNFQGRVTITADESTSTAYME | | SGSGSGTDFTLTISSLQPEDFA | |
| | LSSLRSEDTAVYYCATGLGVT | | TYYCQQTYMMPYTFGQGTK | |
| | TSNYYYGMDVWGQGTLVTV | | LEIKR | |
| | SS | | | |
| 114 | QVQLVQSGAEVKKPGASVKV | 1060 | DIQMTQSPSSLSASVGDRVTI | 1115 |
| | SCKASGGTFSKYAISWVRQAP | | TCRASQSIGNWLAWYQQKPG | |
| | GQGLEWMGWMNPNSGNTGY | | KAPKLLIYKASSLESGVPSRFS | |
| | AQKFQGRVTMTRDTSTSTVY | | GSGSGTDFTLTISSLQPEDFAT | |
| | MELSSLRSEDTAVYYCARDQ | | YYCQQSYNTPPTFGPGTKVDI | |
| | GLTGYFDLWGRGTLVTVSS | | KR | |
| 115 | QVQLVQSGAEVKKPGASVKV | 1061 | DIVMTQSPLSLPVTPGEPASIS | 1116 |
| | SCKASGYTFTGYYMHWVRQA | | CRSSQSLLHSNGYNYLDWYL | |
| | PGQGLEWMGIISPSGGSPTYA | | QKPGQSPQLLIYLGSNRASGV | |
| | QKFQGRVTMTRDTSTSTVYM | | PDRFSGSGSGTDFTLKISRVE | |
| | ELSSLRSEDTAVYYCAREGNG | | AEDVGVYYCMQALQTPYTF | |
| | GMDVWGQGTTVTVSS | | GQGTKLEIKR | |
| 116 | EVQLLESGGGLVQPGGSLRLS | 1062 | DIQMTQSPSSLSASVGDRVTI | 1117 |
| | CAASGFTFSNYAMAWVRQAP | | TCRASQSISSYLNWYQQKPG | |
| | GKGLEWVSAISGSGGGTYYA | | KAPKLLIYATSRLQSGVPSRF | |
| | DSVKGRFTISRDNSKNTLYLQ | | SGSGSGTDFTLTISSLQPEDFA | |
| | MNSLRAEDTAVYYCAREGGY | | TYYCQQGFNFPPTFGGGTKV | |
| | DPDYYYYGMDVWGQGTTVT | | EIKR | |
| | VSS | | | |
| 117 | EVQLLESGGGLVQPGGSLRLS | 1063 | DIQMTQSPSSLSASVGDRVTI | 1118 |
| | CAASGFTFGDYPMSWVRQAP | | TCRASQTIGTWLAWYQQKPG | |
| | GKGLEWVAGISYDGLNEHYA | | KAPKLLIYDASSLESGVPSRFS | |
| | DSVKGRFTISRDNSKNTLYLQ | | GSGSGTDFTLTISSLQPEDFAT | |
| | MNSLRAEDTAVYYCARDRDS | | YYCQQSYSTPPTFGQGTKVEI | |
| | GPSGFQHWGQGTLVTVSS | | KR | |
| 118 | EVQLVESGGGLVKPGGSLRLS | 1064 | DIVMTQSPLSLPVTPGEPASIS | 1119 |
| | CAASGFTISNAWMSWVRQAP | | CRSSQSLLHSNGYNYLDWYL | |
| | GKGLEWVAHIWNDGSQKYY | | QKPGQSPQLLIYAASSLQSGV | |
| | ADSVKGRFTISRDDSKNTLYL | | PDRFSGSGSGTDFTLKISRVE | |
| | QMNSLKTEDTAVYYCARDGA | | AEDVGVYYCMQGLQTPHTF | |
| | LGVGPDDYWGQGTLVTVSS | | GGGTKVEIKR | |
| 119 | QVQLVQSGAEVKKPGASVKV | 1065 | DIVMTQSPLSLPVTPGEPASIS | 1120 |
| | SCKASGNTLTNDHIHWVRQA | | CRSSQSLLHSNGYNYLDWYL | |
| | PGQGLEWMGWMNPNSGDTG | | QKPGQSPQLLIYMGSNRASG | |
| | YAQKFQGRVTMTRDTSTSTV | | VPDRFSGSGSGTDFTLKISRV | |
| | YMELSSLRSEDTAVYYCARA | | EAEDVGVYYCMQALETPTFG | |
| | GVDTAMVTYYYYGMDVWG | | QGTRLEIKR | |
| | QGTTVTVSS | | | |
| 120 | QVQLVQSGAEVKKPGASVKV | 1066 | DIQMTQSPSSLSASVGDRVTI | 1121 |
| | SCKASGYTFTTYYMHWVRQA | | TCRASQSIGTYLHWYQQKPG | |
| | PGQGLEWMGWMNPNSGNTG | | KAPKLLIYAISTLQNGVPSRFS | |
| | YAQKFQGRVTMTRDTSTSTV | | GSGSGTDFTLTISSLQPEDFAT | |
| | YMELSSLRSEDTAVYYCARG | | YYCQQSYSPPLTFGGGTKVEI | |
| | HKVDSGYDPYGMDVWGQGT | | KR | |
| | TVTVSS | | | |
| 121 | QVQLVQSGAEVKKPGASVKV | 1067 | DIQMTQSPSSLSASVGDRVTI | 1122 |
| | SCKASGDSFTDYYIHWVRQAP | | TCRASQNIGNWLAWYQQKP | |
| | GQGLEWMGWMNPNSGNTGY | | GKAPKLLIYAASTLQSGVPSR | |
| | AQQFQGRVTMTRDTSTSTVY | | FSGSGSGTDFTLTISSLQPEDF | |
| | MELSSLRSEDTAVYYCARDRE | | ATYYCQQSYNSITFGPGTKV | |
| | YSSSSRYFDLWGRGTLVTVSS | | DIKR | |
| 122 | QVQLVQSGAEVKKPGASVKV | 1068 | DIQMTQSPSSLSASVGDRVTI | 1123 |
| | SCKASGYTFTDYWLHWVRQA | | TCRASQSISSYLNWYQQKPG | |
| | PGQGLEWMGTINPSGGSTSYS | | KAPKLLIYAASSLQSGVPSRF | |
| | HKFQGRVTMTRDTSTSTVYM | | SGSGSGTDFTLTISSLQPEDFA | |
| | ELSSLRSEDTAVYYCAKEEEG | | TYYCQQSYSTPLTFGQGTKV | |
| | FWSGYAFDYWGQGTLVTVSS | | EIKR | |
| 123 | EVQLLESGGGLVQPGGSLRLS | 1069 | DIQMTQSPSSLSASVGDRVTI | 1124 |
| | CAASGFILGNAWMHWVRQAP | | TCQASQDINNYLNWYQQKPG | |
| | GKGLEWVASVSGDGSDENYA | | KAPKLLIYAASNLQSGVPSRF | |
| | DSVKGRFTISRDNSKNTLYLQ | | SGSGSGTDFTLTISSLQPEDFA | |
| | MNSLRAEDTAVYYCARDTHD | | TYYCQQTYSFPLTFGGGTKV | |
| | YGDYAPFDYWGQGTLVTVSS | | EIKR | |
| 124 | EVQLVESGGGLVKPGGSLRLS | 1070 | EIVMTQSPATLSVSPGERATL | 1125 |
| | CAASGFTFSSYWMHWVRQAP | | SCRASQSVSTYVAWYQQKPG | |
| | GKGLEWVAVIWYDGSNKYY | | QAPRLLIYGASTRATGIPARFS | |
| | ADSVKGRFTISRDDSKNTLYL | | GSGSGTEFTLTISSLQSEDFAV | |
| | QMNSLKTEDTAVYYCVRDGA | | YYCQQYYDTPLTFGGGTKVE | |
| | RSGMDVWGQGTTVTVSS | | IKR | |
| 125 | QVQLVQSGAEVKKPGASVKV | 1071 | DIQMTQSPSSLSASVGDRVTI | 1126 |
| | SCKASGYSFTTYDIHWVRQAP | | TCQASQDISNYLNWYQQKPG | |
| | GQGLEWMGWMNPNSGNTGY | | KAPKLLIYAASTLQSGVPSRF | |
| | AQKFQGRVTMTRDTSTSTVY | | SGSGSGTDFTLTISSLQPEDFA | |
| | MELSSLRSEDTAVYYCATDH | | TYYCQQYSYLPVTFGQGTKL | |
| | WVLGGFDYWGQGTLVTVSS | | EIKR | |
| 126 | EVQLLESGGGLVQPGGSLRLS | 1072 | DIQMTQSPSSLSASVGDRVTI | 1127 |
| | CAASGFTFTTYDMHWVRQAP | | TCRASQSISTWLAWYQQKPG | |
| | GKGLEWVAGINWNSVIIDYA | | KAPKLLIYAASSLQSGVPSRF | |
| | DSVKGRFTISRDNSKNTLYLQ | | SGSGSGTDFTLTISSLQPEDFA | |
| | MNSLRAEDTAVYYCAKDLLY | | TYYCQQSDTLPLTFGGGTKV | |
| | YYDSIGAFDIWGQGTMVTVSS | | EIKR | |
| 127 | QVQLVQSGAEVKKPGASVKV | 1073 | DIQMTQSPSSLSASVGDRVTI | 1128 |
| | SCKASGYTFTNHHMHWVRQA | | TCQASQDIRNFLNWYQQKPG | |
| | PGQGLEWMGMINPSGGSTSY | | KAPKLLIYGASTLHSGVPSRF | |
| | AQKFQGRVTMTRDTSTSTVY | | SGSGSGTDFTLTISSLQPEDFA | |
| | MELSSLRSEDTAVYYCARGRP | | TYYCQQSYSTPLTFGGGTKV | |
| | VDIVATYYFDYWGQGTLVTV | | EIKR | |
| | SS | | | |
| 128 | QVQLVQSGAEVKKPGASVKV | 1074 | DIQMTQSPSSLSASVGDRVTI | 1129 |
| | SCKASGYTFTNYYIHWVRQAP | | TCRASQGISSALAWYQQKPG | |
| | GQGLEWLGWTNPINGDTGSA | | KAPKLLIYAASSLQSGVPSRF | |
| | QKFQGRVTMTRDTSTSTVYM | | SGSGSGTDFTLTISSLQPEDFA | |
| | ELSSLRSEDTAVYYCAKEGQL | | TYYCQQSYSTPLTFGGGTKV | |
| | AWADYYYYMDVWGKGTTVT | | EIKR | |
| | VSS | | | |
| 129 | EVQLVESGGGLVKPGGSLRLS | 1075 | DIQMTQSPSSLSASVGDRVTI | 1130 |
| | CAASGFSLRNYWMHWVRQA | | TCRASQSISSYLNWYQQKPG | |
| | PGKGLEWVSGISGSGGSTYYA | | KAPKLLIYAASSLQSGVPSRF | |
| | DSVKGRFTISRDDSKNTLYLQ | | SGSGSGTDFTLTISSLQPEDFA | |
| | MNSLKTEDTAVYYCARDYTG | | TYYCQQSYSTPLTFGGGTKV | |
| | VVDYWGQGTLVTVSS | | EIKR | |
| 130 | QVQLVQSGAEVKKPGASVKV | 1076 | DIQMTQSPSSLSASVGDRVTI | 1131 |
| | SCKASGGTFSNYAISWVRQAP | | TCRASQSIGTWLAWYQQKPG | |
| | GQGLEWMAWMNPNSGNTGY | | KAPKLLIYGATRLLSGVPSRF | |
| | AQKFQGRVTMTRDTSTSTVY | | SGSGSGTDFTLTISSLQPEDFA | |
| | MELSSLRSEDTAVYYCARDGF | | TYYCQQSYSTPPTFGQGTKLE | |
| | IGFGELFSAFDIWGQGTMVTV | | IKR | |
| | SS | | | |
| 131 | QVQLVQSGAEVKKPGASVKV | 1077 | DIQMTQSPSSLSASVGDRVTI | 1132 |
| | SCKASGGTFSNYAINWVRQAP | | TCQASQDISDHLNWYQQKPG | |
| | GQGLEWMGWINPNSGGTDSA | | KAPKLLIYGASTLQSGVPSRF | |
| | QKFQGRVTMTRDTSTSTVYM | | SGSGSGTDFTLTISSLQPEDFA | |
| | ELSSLRSEDTAVYYCARDSSL | | TYYCQQAYSFPWTFGQGTKL | |
| | ALSYGGNSEYYYGMDVWGQ | | EIKR | |
| | GTTVTVSS | | | |
| 132 | EVQLLESGGGLVQPGGSLRLS | 1078 | EIVMTQSPATLSVSPGERATL | 1133 |
| | CAASGFTFNNYGMHWVRQAP | | SCRASQSVNSYLAWYQQKPG | |
| | GKGLEWVSAISGSGGSTYYAD | | QAPRLLIYGASTRATGIPARFS | |
| | SVKGRFTISRDNSKNTLYLQM | | GSGSGTEFTLTISSLQSEDFAV | |
| | NSLRAEDTAVYYCAREYMQQ | | YYCQQYGSSPLSFGGGTKVEI | |
| | PHGGMDVWGQGTTVTVSS | | KR | |
| 133 | EVQLLESGGGLVQPGGSLRLS | 1079 | DIQMTQSPSSLSASVGDRVTI | 1134 |
| | CAASGFTFSSSWMHWVRQAP | | TCRASQGISSYLAWYQQKPG | |
| | GKGLEWVSAISSSGDATYYAD | | KAPKLLIYTASSLQSGVPSRFS | |
| | SVKGRFTISRDNSKNTLYLQM | | GSGSGTDFTLTISSLQPEDFAT | |
| | NSLRAEDTAVYYCAKFSDGG | | YYCQQYDNLPITFGQGTRLEI | |
| | AGDSDYWGQGTLVTVSS | | KR | |
| 134 | QVQLVQSGAEVKKPGASVKV | 1080 | DIQMTQSPSSLSASVGDRVTI | 1135 |
| | SCKASGYTFDSYLLHWVRQA | | TCRASQSIDSWLAWYQQKPG | |
| | PGQGLEWMGMINPSGAGTTY | | KAPKLLIYAASSLQSGVPSRF | |
| | AQKFQGRVTMTRDTSTSTVY | | SGSGSGTDFTLTISSLQPEDFA | |
| | MELSSLRSEDTAVYYCAKEGS | | TYYCQQSYTTPITFGGGTKVE | |
| | IAAGYYFDSWGQGTLVTVSS | | IKR | |
| 135 | QVQLVQSGAEVKKPGASVKV | 1081 | DIVMTQSPDSLAVSLGERATI | 1136 |
| | SCKASGYSFTTYGITWVRQAP | | NCKSSQSVLYGSNNKNYLA | |
| | GQGLEWMGWINPNSGNAGY | | WYQQKPGQPPKLLIYWASTR | |
| | AQKFQGRVTMTRDTSTSTVY | | ESGVPDRFSGSGSGTDFTLTIS | |
| | MELSSLRSEDTAVYYCASDLA | | SLQAEDVAVYYCQQYYSTPL | |
| | GYSSGYFDLWGRGTLVTVSS | | TFGGGTKVEIKR | |
| 136 | QVQLVQSGAEVKKPGASVKV | 1082 | DIQMTQSPSSLSASVGDRVTI | 1137 |
| | SCKASGDTLTNHFVHWVRQA | | TCRASQRIGNWLAWYQQKP | |
| | PGQGLEWMGWMNPNSGNTG | | GKAPKLLIYAASSLQSGVPSR | |
| | YAQKFQGRVTMTRDTSTSTV | | FSGSGSGTDFTLTISSLQPEDF | |
| | YMELSSLRSEDTAVYYCARDP | | ATYYCQQSYSPPLTFGPGTKV | |
| | QMGAVAGGFDYWGQGTLVT | | DIKR | |
| | VSS | | | |
| 137 | QVQLVQSGAEVKKPGASVKV | 1083 | DIQMTQSPSSLSASVGDRVTI | 1138 |
| | SCKASGYTFTDYYIHWVRQAP | | TCRASQGISSYLAWYQQKPG | |
| | GQGLEWMGMVNPSGGSANY | | KAPKLLIYDASNLDTGVPSRF | |
| | AQKFQGRVTMTRDTSTSTVY | | SGSGSGTDFTLTISSLQPEDFA | |
| | MELSSLRSEDTAVYYCAKDSA | | TYYCQQSYSTPLTFGGGTKV | |
| | WQEPYYFDYWGQGTLVTVSS | | EIKR | |
| 138 | QVQLVQSGAEVKKPGASVKV | 1084 | EIVMTQSPATLSVSPGERATL | 1139 |
| | SCKASGYTFSSYDMHWVRQA | | SCRASQSVGSNLAWYQQKPG | |
| | PGQGLEWMGVINPGGGYTNY | | QAPRLLIYGASTRATGIPARFS | |
| | AQKFQGRVTMTRDTSTSTVY | | GSGSGTEFTLTISSLQSEDFAV | |
| | MELSSLRSEDTAVYYCARDEG | | YYCQQSHSLPPTFGQGTRLEI | |
| | WELLLDYWGQGTLVTVSS | | KR | |
| 139 | QVQLVQSGAEVKKPGASVKV | 1085 | DIQMTQSPSSLSASVGDRVTI | 1140 |
| | SCKASGYTLSDHDINWVRQAP | | TCRASQGIRNYLAWYQQKPG | |
| | GQGLEWMGWMNPSTGNTGY | | KAPKLLIYAASSLQSGVPSRF | |
| | AQKFQGRVTMTRDTSTSTVY | | SGSGSGTDFTLTISSLQPEDFA | |
| | MELSSLRSEDTAVYYCERDQL | | TYYCQQSYSIPLTFGGGTKVE | |
| | RFGAWFDPWGQGTLVTVSS | | IKR | |
| 140 | EVQLVESGGGLVKPGGSLRLS | 1086 | DIQMTQSPSSLSASVGDRVTI | 1141 |
| | CAASGITVSSSWMHWVRQAP | | TCRASQSISSWLAWYQQKPG | |
| | GKGLEWVSAIGTGGGTHYAD | | KAPKLLIYDASTLQSGVPSRF | |
| | SVKGRFTISRDDSKNTLYLQM | | SGSGSGTDFTLTISSLQPEDFA | |
| | NSLKTEDTAVYYCARDQGGQ | | TYYCQQSYSIPLTFGGGTKVE | |
| | IDHWGQGTLVTVSS | | IKR | |
| 141 | QVQLVQSGAEVKKPGASVKV | 1087 | DIQMTQSPSSLSASVGDRVTI | 1142 |
| | SCKASGGTFSSYAISWVRQAP | | TCRASQSISSYLNWYQQKPG | |
| | GQGLEWMGVISPNGDTTVYA | | KAPKLLIYAASSLHSGVPSRF | |
| | QKFQGRVTMTRDTSTSTVYM | | SGSGSGTDFTLTISSLQPEDFA | |
| | ELSSLRSEDTAVYYCARDRGV | | TYYCQQSYSPPITFGQGTRLEI | |
| | AHSYYYGMDVWGQGTLVTV | | KR | |
| | SS | | | |
| 142 | EVQLLESGGGLVQPGGSLRLS | 1088 | DIQMTQSPSSLSASVGDRVTI | 1143 |
| | CAASGFTFSSYWMHWVRQAP | | TCRASQSISSYLNWYQQKPG | |
| | GKGLEWVAVISYDGSDKYYA | | KAPKLLIYAASSLQSGVPSRF | |
| | DSVKGRFTISRDNSKNTLYLQ | | SGSGSGTDFTLTISSLQPEDFA | |
| | MNSLRAEDTAVYYCARGLGG | | TYYCQQSYSTPLTFGGGTKV | |
| | TTGTADFDYWGQGTLVTVSS | | EIKR | |
| 143 | QVQLVQSGAEVKKPGASVKV | 1089 | DIQMTQSPSSLSASVGDRVTI | 1144 |
| | SCKASGYTFTGYYMHWVRQA | | TCRASQSIGTYLSWYQQKPG | |
| | PGQGLEWMGWMNANSGNTG | | KAPKLLIYAASSLQSGVPSRF | |
| | FAQKFQGRVTMTRDTSTSTVY | | SGSGSGTDFTLTISSLQPEDFA | |
| | MELSSLRSEDTAVYYCARDSS | | TYYCQQSYSSPITFGQGTKLEI | |
| | SWLSGGGWFDPWGQGTLVTV | | KR | |
| | SS | | | |
| 191 | QVQLVQSGAEVKKPGASVKV | 1997 | DIQMTQSPSSLSASVGDRVTI | 2000 |
| | SCKASGGTFSSYAISWVRQAP | | TCQASHDINIHLNWYQQKPG | |
| | GQGLEWMGWMNPNSGNTGY | | KAPKLLIYDASNLETGVPSRF | |
| | AQKFQGRVTMTRDTSTSTVY | | SGSGSGTDFTLTISSLQPEDFA | |
| | MELSSLRSEDTAVYYCAREDY | | TYYCQQAYSLPWTFGQGTKV | |
| | YDSSGNFDYWGQGTLVTVSS | | EIKR | |
| 192 | QVQLVQSGAEVKKPGASVKV | 1998 | DIQMTQSPSSLSASVGDRVTI | 2001 |
| | SCKASGYTFTNYYMHWVRQA | | TCRASQGISNYLAWYQQKPG | |
| | PGQGLEWMGWINPNSGDTNY | | KAPKLLIYSASNLQSGVPSRF | |
| | EQKFQGRVTMTRDTSTSTVY | | SGSGSGTDFTLTISSLQPEDFA | |
| | MELSSLRSEDTAVYYCARDD | | TYYCQQSFSTPFTFGQGTKLE | |
| | RIQLWVPLVFWGQGTLVTVSS | | IKR | |
| 193 | EVQLLESGGGLVQPGGSLRLS | 1999 | DIQMTQSPSSLSASVGDRVTI | 2002 |
| | CAASGFTFSNSDMNWVRQAP | | TCRASQSIYNYLNWYQQKPG | |
| | GKGLEWVSYISGTGSTIYYAD | | KAPKLLIYAASNLQSGVPSRF | |
| | SVKGRFTISRDNSKNTLYLQM | | SGSGSGTDFTLTISSLQPEDFA | |
| | [sequence omitted] | | TYYCQQYGNAPLTFGQGTKV | |
| | YGSGYYGMDVWGQGTTVTV | | EIKR | |
| | SS | | | |

[1362] The polypeptides above were tested as disclosed above in Examples 4 and 5. Data is disclosed below in Table 16c, reporting FACS fold change over parental as (−), indicating <2 fold; (+), indicating 2-10 fold; (++), indicating 10-30 fold; and (+++), indicating >30 fold.

TABLE 16c
Polypeptide Activity (FACS and BLI)

| | CD33 Mutant | CD33 WT | | |
|---|---|---|---|---|
| | Geometric | Geometric | CD33 R69 | CD33 R69G |
| | Mean Fold | Mean Fold | BLI/Octet | BLI/Octet |
| Polypeptide | Change over | Change over | Binding Summary | Binding Summary |
| No. | Jurkat Parental | Jurkat Parental | (Yes/No/Ambiguous) | (Yes/No/Ambiguous) |
| 89 | ++ | ++ | Yes | Yes |
| 90 | +++ | +++ | Yes | Yes |
| 91 | ++ | +++ | Yes | Yes |
| 92 | + | + | Yes | Yes |
| 93 | + | + | Yes | Yes |
| 94 | ++ | + | Yes | Yes |
| 95 | + | + | Yes | Yes |
| 96 | +++ | +++ | Yes | Yes |
| 97 | + | ++ | Yes | Yes |
| 98 | +++ | ++ | Yes | Yes |
| 99 | ++ | +++ | Yes | Yes |
| 100 | ++ | ++ | Yes | Yes |
| 101 | +++ | +++ | Yes | Yes |
| 102 | ++ | ++ | Yes | Yes |
| 103 | ++ | ++ | Yes | Yes |
| 104 | +++ | +++ | Yes | Yes |
| 105 | ++ | ++ | Yes | Yes |
| 106 | + | + | Yes | Yes |
| 107 | ++ | ++ | Yes | Yes |
| 108 | ++ | ++ | Yes | Yes |
| 109 | ++ | ++ | Yes | Yes |
| 110 | +++ | +++ | Yes | Yes |
| 111 | ++ | +++ | Yes | Yes |
| 112 | + | + | Yes | Yes |
| 113 | ++ | +++ | Yes | Yes |
| 114 | ++ | +++ | Yes | Yes |
| 115 | ++ | ++ | Yes | Yes |
| 116 | +++ | +++ | Yes | Yes |
| 117 | + | + | Yes | Yes |
| 118 | + | ++ | Yes | Yes |
| 119 | +++ | ++ | Yes | Yes |
| 120 | +++ | +++ | Yes | Yes |
| 121 | ++ | ++ | Yes | Yes |
| 122 | +++ | ++ | Yes | Yes |
| 123 | +++ | +++ | Yes | Yes |
| 124 | +++ | +++ | Yes | Yes |
| 125 | +++ | +++ | Yes | Yes |
| 126 | ++ | +++ | Yes | Yes |
| 127 | ++ | ++ | Yes | Yes |
| 128 | ++ | ++ | Yes | Yes |
| 129 | ++ | ++ | Yes | Yes |
| 130 | ++ | ++ | Yes | Yes |
| 131 | ++ | +++ | Yes | Yes |
| 132 | ++ | + | Yes | Yes |
| 133 | + | + | Yes | Yes |
| 134 | +++ | +++ | Yes | Yes |
| 135 | +++ | ++ | Yes | Yes |
| 136 | ++ | ++ | Yes | Yes |
| 137 | +++ | +++ | Yes | Yes |
| 138 | ++ | ++ | Yes | Yes |
| 139 | +++ | +++ | Yes | Yes |
| 140 | + | + | Yes | Yes |
| 141 | +++ | ++ | Yes | Yes |
| 142 | + | + | Yes | Yes |
| 143 | + | + | Yes | Yes |
| 191 | ++ | +++ | Yes | Yes |
| 192 | ++ | ++ | Yes | Yes |
| 193 | +++ | +++ | Yes | Yes |

### Example 18: Identification of Non-Selective Anti-Human CLL-1 scFv Clones

[1363] The methods above in Example 1 have been used to discover non-selective anti-human CLL-1 scFv clones.

TABLE 17a
Sequences of Non-Selective Anti-CLL-1 Polypeptides (CDR Sequences)

| Poly- | | | | | | | | | | | | |
|---|---|---|---|---|---|---|---|---|---|---|---|---|
| peptide | | SEQ ID | | SEQ ID | | SEQ ID | | SEQ ID | | SEQ ID | | SEQ ID |
| No. | HCDR1 | NO | HCDR2 | NO | HCDR3 | NO | LCDR1 | NO | LCDR2 | NO | LCDR3 | NO |
| 144 | YTFTA | 1145 | GIIDPS | 1192 | CARGD | 1239 | RASQG | 1286 | DASSL | 1333 | CQQSY | 1380 |
| | YYMH | | GGSTS | | YGDYH | | ISSYLA | | QS | | STPITF | |
| | | | YA | | TLW | | | | | | | |
| 145 | GTFSTS | 1146 | GWIHP | 1193 | CARDL | 1240 | RVSQG | 1287 | DASNL | 1334 | CQQSY | 1381 |
| | YMH | | DDGNT | | GDYDT | | ISSYLN | | QA | | STPPTF | |
| | | | DYA | | FDIW | | | | | | | |
| 146 | YTFSG | 1147 | GWIDP | 1194 | CARDY | 1241 | RVSQG | 1288 | EASSL | 1335 | CQQSY | 1382 |
| | HYMH | | NSGGT | | PFYGD | | ISSYLN | | ES | | SIPFTF | |
| | | | NYA | | NDAFD | | | | | | | |
| | | | | | IW | | | | | | | |
| 147 | YTFTS | 1148 | GGIIPS | 1195 | CARGT | 1242 | RASQG | 1289 | DASNL | 1336 | CQQSY | 1383 |
| | YHIH | | GGSTS | | NDDHY | | ISNYLA | | ET | | STPLTF | |
| | | | YA | | DYW | | | | | | | |
| 148 | GTFTT | 1149 | GWMN | 1196 | CARGT | 1243 | RASQSI | 1290 | AASSL | 1337 | CQQSF | 1384 |
| | YGIS | | PFSDN | | GDDAF | | STWVA | | QS | | SIPLTF | |
| | | | TDYA | | DIW | | | | | | | |
| 149 | YTFTS | 1150 | GWMN | 1197 | CAREL | 1244 | RASQSI | 1291 | SASNL | 1338 | CQQAI | 1385 |
| | YDIN | | PNSGN | | EGEWF | | SSYLN | | QS | | SFPLTF | |
| | | | TGYA | | DPW | | | | | | | |
| 150 | YIFTSQ | 1151 | GWINP | 1198 | CARDP | 1245 | RASQG | 1292 | DASHL | 1339 | CQQNY | 1386 |
| | YIH | | NSGGT | | WGAY | | ISNNLN | | DT | | SPPPTF | |
| | | | NYA | | GGDAF | | | | | | | |
| | | | | | DIW | | | | | | | |
| 151 | YTFTD | 1152 | GWMN | 1199 | CARVD | 1246 | RASQG | 1293 | DASNL | 1340 | CQQSY | 1387 |
| | YYIH | | PNSGN | | TADY | | ISSWL | | QT | | STPLTF | |
| | | | TGYA | | MDVW | | A | | | | | |
| 152 | GTFST | 1153 | GWMN | 1200 | CAKED | 1247 | RASQSI | 1294 | DASNL | 1341 | CQQSH | 1388 |
| | NAIS | | PNSGN | | YGGNF | | GPWLA | | QA | | SLPLTF | |
| | | | TGYA | | DYW | | | | | | | |
| 153 | GAFSS | 1154 | GWMN | 1201 | CAAD | 1248 | RASQSI | 1295 | DASRL | 1342 | CQQSY | 1389 |
| | YALS | | PNSGN | | WMIGG | | SSWLA | | QS | | GIPLTF | |
| | | | TGYA | | DAFDI | | | | | | | |
| | | | | | W | | | | | | | |
| 154 | GTFSS | 1155 | GWINP | 1202 | CAGEV | 1249 | RASQG | 1296 | AASSL | 1343 | CQQSY | 1390 |
| | YGVT | | NTGGT | | GVGGY | | ISNWL | | QS | | SIPLTF | |
| | | | DYA | | DAFDI | | A | | | | | |
| | | | | | W | | | | | | | |
| 155 | YTFTS | 1156 | GWMN | 1203 | CARPE | 1250 | RASQSI | 1297 | DASNL | 1344 | CQQSF | 1391 |
| | YDIN | | PSSGD | | RSDAF | | GPWLA | | EA | | SSPLTF | |
| | | | SGYA | | DIW | | | | | | | |
| 156 | YTFTG | 1157 | GWMN | 1204 | CARGD | 1251 | RASQSI | 1298 | DAFTL | 1345 | CQQSY | 1392 |
| | YFIH | | PNSGN | | YADW | | STWLA | | ET | | STPLTF | |
| | | | TGYA | | FDPW | | | | | | | |
| 157 | YTFSD | 1158 | GIINPS | 1205 | CARG | 1252 | RASQG | 1299 | DASNL | 1346 | CQQTY | 1393 |
| | YYIH | | GGSTS | | MTDD | | ISSWL | | ET | | AIPLTF | |
| | | | YA | | AFDIW | | A | | | | | |
| 158 | DSFSS | 1159 | GWINP | 1206 | CARST | 1253 | RASQSI | 1300 | DASNL | 1347 | CQQSY | 1394 |
| | YGIS | | KSGAT | | AFDAF | | SSWLA | | ET | | STPLTF | |
| | | | TSA | | DIW | | | | | | | |
| 159 | YSFTA | 1160 | GIINPS | 1207 | CARGN | 1254 | RASQSI | 1301 | DASNL | 1348 | CQQSY | 1395 |
| | NYIH | | GGSTS | | YGDYV | | SSWLA | | ET | | GTPLTF | |
| | | | YA | | EDW | | | | | | | |
| 160 | GTFTS | 1161 | GWINP | 1208 | CARLV | 1255 | RASQSI | 1302 | AASSL | 1349 | CQQGY | 1396 |
| | YDIN | | HSGGT | | GGDAF | | SSWLA | | QG | | TTPLTF | |
| | | | NYA | | DIW | | | | | | | |
| 161 | YTFTS | 1162 | GMINP | 1209 | CAREL | 1256 | RASQG | 1303 | GASIL | 1350 | CQQSY | 1397 |
| | YDIN | | NSGGT | | LGESF | | ISSYLA | | QS | | STSFTF | |
| | | | SYA | | DYW | | | | | | | |
| 162 | YTFTN | 1163 | GWINP | 1210 | CARGT | 1257 | RASQSI | 1304 | AASTL | 1351 | CQQSY | 1398 |
| | YGIS | | NSGGT | | NGDEL | | SSYLA | | QS | | STPLTF | |
| | | | NFA | | DYW | | | | | | | |
| 163 | YTFTS | 1164 | GWMN | 1211 | CARAL | 1258 | RASQPI | 1305 | DTSSL | 1352 | CQQSY | 1399 |
| | YYMQ | | PNSGN | | YGDYL | | ATWLA | | QS | | SLPLGF | |
| | | | TGYA | | DIW | | | | | | | |
| 164 | YTFTA | 1165 | GIINPN | 1212 | CARDS | 1259 | QASQD | 1306 | ATSTL | 1353 | CQQSY | 1400 |
| | HYIH | | GGRTT | | DFWSG | | ISNFLN | | QS | | TTEWT | |
| | | | YA | | YYSDY | | | | | | F | |
| | | | | | YYGM | | | | | | | |
| | | | | | DVW | | | | | | | |
| 165 | YTFTS | 1166 | GWMN | 1213 | CARLS | 1260 | RASQFI | 1307 | DASSL | 1354 | CQQSY | 1401 |
| | YDIN | | PNSGN | | SGYYP | | ANWL | | ES | | STPLTF | |
| | | | TGYA | | DYW | | A | | | | | |
| 166 | YTFES | 1167 | GWIDP | 1214 | CARAD | 1261 | RASQG | 1308 | DASNL | 1355 | CQQSY | 1402 |
| | YDMN | | HSGDT | | YGGNA | | ISNWL | | ET | | STPYTF | |
| | | | NFA | | DYW | | A | | | | | |
| 167 | YTFTS | 1168 | GWINP | 1215 | CARGT | 1262 | RASQD | 1309 | AASSL | 1356 | CQQSY | 1403 |
| | YYMH | | NSGGT | | TGDDF | | ISTWL | | QS | | SIPPTF | |
| | | | NYA | | DYW | | A | | | | | |
| 168 | YTFTN | 1169 | GWINP | 1216 | CARVR | 1263 | RASQS | 1310 | AASTL | 1357 | CQQSY | 1404 |
| | YGIS | | NSGGT | | SDDFF | | VNHW | | QS | | SLPLTF | |
| | | | NYA | | DYW | | LA | | | | | |
| 169 | YTFTN | 1170 | GWMS | 1217 | CAKDN | 1264 | RVSQG | 1311 | DASNL | 1358 | CQQYD | 1405 |
| | DYIH | | PNSGK | | SSGWY | | ISSYLA | | ET | | TLPITF | |
| | | | TGFA | | FDLW | | | | | | | |
| 170 | GSFSN | 1171 | GWMN | 1218 | CARPR | 1265 | RASQSI | 1312 | EASTL | 1359 | CQQSY | 1406 |
| | HGVS | | PNSGD | | KDDAF | | SSWLA | | QS | | STPLTF | |
| | | | TGYA | | AIW | | | | | | | |
| 171 | YTFTD | 1172 | GMVDP | 1219 | CTSGS | 1266 | RASQSI | 1313 | EASNL | 1360 | CQQSY | 1407 |
| | YYIH | | NTGNI | | TNDAF | | GPWLA | | AS | | STPLTF | |
| | | | NYA | | DIW | | | | | | | |
| 172 | YTFSD | 1173 | GWMN | 1220 | CARGL | 1267 | RASQSI | 1314 | AASSL | 1361 | CQQSY | 1408 |
| | YYVH | | PNSGN | | TGDQF | | SSYLN | | QS | | STPLTF | |
| | | | TGYA | | DYW | | | | | | | |
| 173 | YTFNG | 1174 | GWINP | 1221 | CASLD | 1268 | RASQSI | 1315 | DASSL | 1362 | CQQSY | 1409 |
| | YNMH | | NSGDT | | YGDYA | | STWLA | | RS | | STPITF | |
| | | | NYA | | VYW | | | | | | | |
| 174 | FIFRDH | 1175 | SSIDFS | 1222 | CARDP | 1269 | RASQSI | 1316 | AASSL | 1363 | CQQTY | 1410 |
| | WMH | | TGYIY | | WGDG | | SSWLA | | QS | | TTPYTF | |
| | | | YA | | DFDY | | | | | | | |
| | | | | | W | | | | | | | |
| 175 | YTFTS | 1176 | GWINP | 1223 | CAGGP | 1270 | QASQD | 1317 | DASNL | 1364 | CQQAD | 1411 |
| | YDIH | | NSGNT | | DVDAA | | ISNYLN | | ET | | GFPPTF | |
| | | | GYA | | MVLD | | | | | | | |
| | | | | | YW | | | | | | | |
| 176 | GSFTS | 1177 | GWMN | 1224 | CARGA | 1271 | RASQN | 1318 | DGSNL | 1365 | CQQSY | 1412 |
| | YYIH | | PNSGN | | TDDAF | | IDTWL | | EA | | NTPITF | |
| | | | TGYA | | DIW | | A | | | | | |
| 177 | YTFTS | 1178 | GWMN | 1225 | CARST | 1272 | RASQSI | 1319 | DASNL | 1366 | CQQSY | 1413 |
| | YYMH | | PNSGN | | YSDSF | | SNWLA | | ET | | STPLTF | |
| | | | TGYA | | DYW | | | | | | | |
| 178 | FTFSSS | 1179 | SSITGS | 1226 | CIRDW | 1273 | RVSQG | 1320 | DASNL | 1367 | CQQGY | 1414 |
| | DMS | | GDGTY | | EGIYQ | | ISSYLN | | ET | | STPWT | |
| | | | YA | | W | | | | | | F | |
| 179 | GTFSS | 1180 | GTINPS | 1227 | CAIGG | 1274 | QASQD | 1321 | DASNL | 1368 | CQQGY | 1415 |
| | YAIS | | GGSTN | | YDSPY | | ISNYLN | | ET | | SPPWT | |
| | | | YA | | MDVW | | | | | | F | |
| 180 | YTFTSL | 1181 | GSMNP | 1228 | CAKSD | 1275 | RASQSI | 1322 | DASNL | 1369 | CQQSY | 1416 |
| | DIN | | RSGST | | YGDYL | | SPWLA | | QS | | STPLTF | |
| | | | AYA | | DYW | | | | | | | |
| 181 | YTFTG | 1182 | GVINPS | 1229 | CARGR | 1276 | RASQTI | 1323 | AASTL | 1370 | CQQSY | 1417 |
| | YYMH | | GGSTS | | TDDAF | | SSWLA | | QS | | SIPLTF | |
| | | | YA | | DIW | | | | | | | |
| 182 | YTFTD | 1183 | GIINTG | 1230 | CARGL | 1277 | RASQN | 1324 | EAFTL | 1371 | CQQSD | 1418 |
| | YYMH | | AGTTN | | TSDHF | | IGPWL | | QS | | NIPITF | |
| | | | YA | | DYW | | A | | | | | |
| 183 | GTFSS | 1184 | GGIIPK | 1231 | CARNS | 1278 | RASQSI | 1325 | AASSL | 1372 | CQQSY | 1419 |
| | YAIS | | FGPPN | | YGDDF | | SSWLA | | QR | | STPLTF | |
| | | | YA | | DYW | | | | | | | |
| 184 | GTFGN | 1185 | GVINPS | 1232 | CARSL | 1279 | RASQSI | 1326 | DASNL | 1373 | CQQSY | 1420 |
| | YGIN | | SGGTN | | GWPSP | | SRYLN | | ET | | STPWT | |
| | | | LA | | YMDV | | | | | | F | |
| | | | | | W | | | | | | | |
| 185 | FTFSNS | 1186 | SAISGS | 1233 | CARDD | 1280 | RASQD | 1327 | DASNL | 1374 | CQQSY | 1421 |
| | DMY | | DGTTY | | YGDQG | | IRNDL | | QT | | NMPYT | |
| | | | YA | | FDLW | | G | | | | F | |
| 186 | YTFTK | 1187 | GWINP | 1234 | CARDI | 1281 | QASQD | 1328 | DATNL | 1375 | CQQSY | 1422 |
| | YYMH | | NSGNT | | AVAGS | | ISNYLN | | ET | | STPPTF | |
| | | | GYA | | TYYYY | | | | | | | |
| | | | | | GMDV | | | | | | | |
| | | | | | W | | | | | | | |
| 187 | FTFSSY | 1188 | SSISSS | 1235 | CARDI | 1282 | QASQD | 1329 | GASSL | 1376 | CQQSY | 1423 |
| | DMH | | SSYIYY | | DDVAG | | ISNYLN | | QS | | STPFTF | |
| | | | A | | DYW | | | | | | | |
| 188 | FTFSSY | 1189 | SYTSSS | 1236 | CARGN | 1283 | QASQD | 1330 | DASNL | 1377 | CQQTY | 1424 |
| | GMH | | SSTIYY | | VGDN | | ISNYLN | | ET | | DTPYT | |
| | | | A | | WNDD | | | | | | F | |
| | | | | | EAFLG | | | | | | | |
| | | | | | W | | | | | | | |
| 189 | LTAGS | 1190 | SAISDD | 1237 | CVKDD | 1284 | RASQG | 1331 | GASSL | 1378 | CQQSY | 1425 |
| | NYMS | | GHWT | | GEGSG | | ISDYLA | | QS | | STPWT | |
| | | | DYA | | IDW | | | | | | F | |
| 190 | FTFSSS | 1191 | STINTN | 1238 | CARDT | 1285 | RASQS | 1332 | GASTR | 1379 | CQQYG | 1426 |
| | WMH | | GDAAY | | VLDDY | | VSSSY | | AA | | SSPFTF | |
| | | | YA | | GDYDD | | LA | | | | | |
| | | | | | YGMD | | | | | | | |
| | | | | | VW | | | | | | | |
| 194 | VTFSN | 2003 | GWMN | 2010 | CARGE | 2017 | RASQSI | 2024 | DASSL | 2031 | CQQSH | 2038 |
| | SGIN | | PASGD | | YGAEY | | SSWLA | | ES | | SLPPTF | |
| | | | TGYA | | FQHW | | | | | | | |
| 195 | YTFTN | 2004 | GIINPS | 2011 | CAKPT | 2018 | RASQG | 2025 | DASNL | 2032 | CQQSY | 2039 |
| | SYIH | | GDSTT | | TGDG | | ISNWL | | ET | | STPLTF | |
| | | | YA | | MDVW | | A | | | | | |
| 196 | YTLTN | 2005 | GWISP | 2012 | CTTDL | 2019 | RASRSI | 2026 | DASNL | 2033 | CQQSY | 2040 |
| | YYMH | | TDGKT | | LGDWF | | RSYLN | | ET | | NTPWT | |
| | | | KYA | | DPW | | | | | | F | |
| 197 | YTLTN | 2006 | GWMN | 2013 | CATAT | 2020 | RASQSI | 2027 | GASSL | 2034 | CQQSY | 2041 |
| | NWMH | | PNSGN | | ADDAF | | STWLA | | QS | | DIPITF | |
| | | | TGYA | | DIW | | | | | | | |
| 198 | FTFSTF | 2007 | ATISY | 2014 | CARLE | 2021 | RASQSI | 2028 | DASNL | 2035 | CQQAN | 2042 |
| | WMS | | DGSNQ | | LHEGR | | SSYLN | | ET | | SFPFTF | |
| | | | YYA | | FDYW | | | | | | | |
| 199 | DTFTG | 2008 | GWMN | 2015 | CTTDR | 2022 | RASQS | 2029 | DASSL | 2036 | CQQAN | 2043 |
| | YHIH | | PDSGS | | LYGDY | | VSSWL | | QS | | SFPFTF | |
| | | | TGYA | | FDYW | | A | | | | | |
| 200 | YTFTD | 2009 | PNSGN | 2016 | CAADD | 2023 | ISNYLN | 2030 | EASSL | 2037 | CQQTY | 2044 |
| | YYMH | | GWMN | | TKSPY | | QASQD | | QS | | SPPPTF | |
| | | | TGYA | | GMDV | | | | | | | |
| | | | | | W | | | | | | | |

TABLE 17b
Sequences of Non-Selective Anti-CLL-1 Polypeptides (VH and VL
Sequences)

| Polypeptide | VH | SEQ ID | | SEQ |
|---|---|---|---|---|
| No. | Full | NO | Full VL | ID NO |
| 144 | QVQLVQSGAEVKKPGASVKV | 1427 | DIQMTQSPSSLSASVGDRVTI | 1474 |
| | SCKASGYTFTAYYMHWVRQA | | TCRASQGISSYLAWYQQKPG | |
| | PGQGLEWMGIIDPSGGSTSYA | | KAPKLLIYDASSLQSGVPSRF | |
| | QQFQGRVTMTRDTSTSTVYM | | SGSGSGTDFTLTISSLQPEDFA | |
| | ELSSLRSEDTAVYYCARGDYG | | TYYCQQSYSTPITFGPGTKVD | |
| | DYHTLWGQGTLVTVSS | | IKR | |
| 145 | QVQLVQSGAEVKKPGASVKV | 1428 | DIQMTQSPSSLSASVGDRVTI | 1475 |
| | SCKASGGTFSTSYMHWVRQA | | TCRVSQGISSYLNWYQQKPG | |
| | PGQGLEWMGWIHPDDGNTDY | | KAPKLLIYDASNLQAGVPSRF | |
| | APKFQGRVTMTRDTSTSTVY | | SGSGSGTDFTLTISSLQPEDFA | |
| | MELSSLRSEDTAVYYCARDLG | | TYYCQQSYSTPPTFGQGTKV | |
| | DYDTFDIWGQGTMVTVSS | | EIKR | |
| 146 | QVQLVQSGAEVKKPGASVKV | 1429 | DIQMTQSPSSLSASVGDRVTI | 1476 |
| | SCKASGYTFSGHYMHWVRQA | | TCRVSQGISSYLNWYQQKPG | |
| | PGQGLEWMGWIDPNSGGTNY | | KAPKLLIYEASSLESGVPSRFS | |
| | AQKFQGRVTMTRDTSTSTVY | | GSGSGTDFTLTISSLQPEDFAT | |
| | MELSSLRSEDTAVYYCARDYP | | YYCQQSYSIPFTFGPGTKVDI | |
| | FYGDNDAFDIWGQGTTVTVSS | | KR | |
| 147 | QVQLVQSGAEVKKPGASVKV | 1430 | DIQMTQSPSSLSASVGDRVTI | 1477 |
| | SCKASGYTFTSYHIHWVRQAP | | TCRASQGISNYLAWYQQKPG | |
| | GQGLEWVGGIIPSGGSTSYAQ | | KAPKLLIYDASNLETGVPSRF | |
| | KFQGRVTMTRDTSTSTVYME | | SGSGSGTDFTLTISSLQPEDFA | |
| | LSSLRSEDTAVYYCARGTNDD | | TYYCQQSYSTPLTFGGGTKV | |
| | HYDYWGQGTLVTVSS | | EIKR | |
| 148 | QVQLVQSGAEVKKPGASVKV | 1431 | DIQMTQSPSSLSASVGDRVTI | 1478 |
| | SCKASGGTFTTYGISWVRQAP | | TCRASQSISTWVAWYQQKPG | |
| | GQGLEWMGWMNPFSDNTDY | | KAPKLLIYAASSLQSGVPSRF | |
| | AQNFQGRVTMTRDTSTSTVY | | SGSGSGTDFTLTISSLQPEDFA | |
| | MELSSLRSEDTAVYYCARGTG | | TYYCQQSFSIPLTFGQGTKVEI | |
| | DDAFDIWGQGTMVTVSS | | KR | |
| 149 | QVQLVQSGAEVKKPGASVKV | 1432 | DIQMTQSPSSLSASVGDRVTI | 1479 |
| | SCKASGYTFTSYDINWVRQAP | | TCRASQSISSYLNWYQQKPG | |
| | GQGLEWMGWMNPNSGNTGY | | KAPKLLIYSASNLQSGVPSRF | |
| | AQKFQGRVTMTRDTSTSTVY | | SGSGSGTDFTLTISSLQPEDFA | |
| | MELSSLRSEDTAVYYCARELE | | TYYCQQAISFPLTFGQGTKVE | |
| | GEWFDPWGQGTLVTVSS | | IKR | |
| 150 | QVQLVQSGAEVKKPGASVKV | 1433 | DIQMTQSPSSLSASVGDRVTI | 1480 |
| | SCKASGYIFTSQYIHWVRQAP | | TCRASQGISNNLNWYQQKPG | |
| | GQGLEWMGWINPNSGGTNYA | | KAPKLLIYDASHLDTGVPSRF | |
| | QKFQGRVTMTRDTSTSTVYM | | SGSGSGTDFTLTISSLQPEDFA | |
| | ELSSLRSEDTAVYYCARDPWG | | TYYCQQNYSPPPTFGQGTRLE | |
| | AYGGDAFDIWGQGTMVTVSS | | IKR | |
| 151 | QVQLVQSGAEVKKPGASVKV | 1434 | DIQMTQSPSSLSASVGDRVTI | 1481 |
| | SCKASGYTFTDYYIHWVRQAP | | TCRASQGISSWLAWYQQKPG | |
| | GQGLEWMGWMNPNSGNTGY | | KAPKLLIYDASNLQTGVPSRF | |
| | AQKFQGRVTMTRDTSTSTVY | | SGSGSGTDFTLTISSLQPEDFA | |
| | MELSSLRSEDTAVYYCARVDT | | TYYCQQSYSTPLTFGQGTKV | |
| | ADYMDVWGKGTLVTVSS | | EIKR | |
| 152 | QVQLVQSGAEVKKPGASVKV | 1435 | DIQMTQSPSSLSASVGDRVTI | 1482 |
| | SCKASGGTFSTNAISWVRQAP | | TCRASQSIGPWLAWYQQKPG | |
| | GQGLEWMGWMNPNSGNTGY | | KAPKLLIYDASNLQAGVPSRF | |
| | AQKFQGRVTMTRDTSTSTVY | | SGSGSGTDFTLTISSLQPEDFA | |
| | MELSSLRSEDTAVYYCAKED | | TYYCQQSHSLPLTFGPGTKV | |
| | YGGNFDYWGQGTLVTVSS | | DIKR | |
| 153 | QVQLVQSGAEVKKPGASVKV | 1436 | DIQMTQSPSSLSASVGDRVTI | 1483 |
| | SCKASGGAFSSYALSWVRQAP | | TCRASQSISSWLAWYQQKPG | |
| | GQGLEWMGWMNPNSGNTGY | | KAPKLLIYDASRLQSGVPSRF | |
| | AQKFQGRVTMTRDTSTSTVY | | SGSGSGTDFTLTISSLQPEDFA | |
| | MELSSLRSEDTAVYYCAADW | | TYYCQQSYGIPLTFGGGTKVE | |
| | MIGGDAFDIWGQGTTVTVSS | | IKR | |
| 154 | QVQLVQSGAEVKKPGASVKV | 1437 | DIQMTQSPSSLSASVGDRVTI | 1484 |
| | SCKASGGTFSSYGVTWVRQA | | TCRASQGISNWLAWYQQKPG | |
| | PGQGLEWMGWINPNTGGTDY | | KAPKLLIYAASSLQSGVPSRF | |
| | AQNFQGRVTMTRDTSTSTVY | | SGSGSGTDFTLTISSLQPEDFA | |
| | MELSSLRSEDTAVYYCAGEV | | TYYCQQSYSIPLTFGGGTKVE | |
| | GVGGYDAFDIWGQGTTVTVS | | IKR | |
| | S | | | |
| 155 | QVQLVQSGAEVKKPGASVKV | 1438 | DIQMTQSPSSLSASVGDRVTI | 1485 |
| | SCKASGYTFTSYDINWVRQAP | | TCRASQSIGPWLAWYQQKPG | |
| | GQGLEWMGWMNPSSGDSGY | | KAPKLLIYDASNLEAGVPSRF | |
| | AQKFQGRVTMTRDTSTSTVY | | SGSGSGTDFTLTISSLQPEDFA | |
| | MELSSLRSEDTAVYYCARPER | | TYYCQQSFSSPLTFGGGTKVE | |
| | SDAFDIWGQGTTVTVSS | | IKR | |
| 156 | QVQLVQSGAEVKKPGASVKV | 1439 | DIQMTQSPSSLSASVGDRVTI | 1486 |
| | SCKASGYTFTGYFIHWVRQAP | | TCRASQSISTWLAWYQQKPG | |
| | GQGLEWMGWMNPNSGNTGY | | KAPKLLIYDAFTLETGVPSRF | |
| | AQKFQGRVTMTRDTSTSTVY | | SGSGSGTDFTLTISSLQPEDFA | |
| | MELSSLRSEDTAVYYCARGD | | TYYCQQSYSTPLTFGQGTKV | |
| | YADWFDPWGQGTLVTVSS | | EIKR | |
| 157 | QVQLVQSGAEVKKPGASVKV | 1440 | DIQMTQSPSSLSASVGDRVTI | 1487 |
| | SCKASGYTFSDYYIHWVRQAP | | TCRASQGISSWLAWYQQKPG | |
| | GQGLEWMGIINPSGGSTSYAQ | | KAPKLLIYDASNLETGVPSRF | |
| | KFQGRVTMTRDTSTSTVYME | | SGSGSGTDFTLTISSLQPEDFA | |
| | LSSLRSEDTAVYYCARGMTD | | TYYCQQTYAIPLTFGGGTKLE | |
| | DAFDIWGQGTMVTVSS | | IKR | |
| 158 | QVQLVQSGAEVKKPGASVKV | 1441 | DIQMTQSPSSLSASVGDRVTI | 1488 |
| | SCKASGDSFSSYGISWVRQAP | | TCRASQSISSWLAWYQQKPG | |
| | GQGLEWMGWINPKSGATTSA | | KAPKLLIYDASNLETGVPSRF | |
| | QKFQGRVTMTRDTSTSTVYM | | SGSGSGTDFTLTISSLQPEDFA | |
| | ELSSLRSEDTAVYYCARSTAF | | TYYCQQSYSTPLTFGQGTKV | |
| | DAFDIWGQGTTVTVSS | | EIKR | |
| 159 | QVQLVQSGAEVKKPGASVKV | 1442 | DIQMTQSPSSLSASVGDRVTI | 1489 |
| | SCKASGYSFTANYIHWVRQAP | | TCRASQSISSWLAWYQQKPG | |
| | GQGLEWMGIINPSGGSTSYAQ | | KAPKLLIYDASNLETGVPSRF | |
| | KFQGRVTMTRDTSTSTVYME | | SGSGSGTDFTLTISSLQPEDFA | |
| | LSSLRSEDTAVYYCARGNYG | | TYYCQQSYGTPLTFGGGTKV | |
| | DYVEDWGQGTLVTVSS | | EIKR | |
| 160 | QVQLVQSGAEVKKPGASVKV | 1443 | DIQMTQSPSSLSASVGDRVTI | 1490 |
| | SCKASGGTFTSYDINWVRQAP | | TCRASQSISSWLAWYQQKPG | |
| | GQGLEWMGWINPHSGGTNYA | | KAPKLLIYAASSLQGGVPSRF | |
| | QKFQGRVTMTRDTSTSTVYM | | SGSGSGTDFTLTISSLQPEDFA | |
| | ELSSLRSEDTAVYYCARLVGG | | TYYCQQGYTTPLTFGPGTKV | |
| | DAFDIWGQGTMVTVSS | | DIKR | |
| 161 | QVQLVQSGAEVKKPGASVKV | 1444 | DIQMTQSPSSLSASVGDRVTI | 1491 |
| | SCKASGYTFTSYDINWVRQAP | | TCRASQGISSYLAWYQQKPG | |
| | GQGLEWMGMINPNSGGTSYA | | KAPKLLIYGASILQSGVPSRFS | |
| | QKFQGRVTMTRDTSTSTVYM | | GSGSGTDFTLTISSLQPEDFAT | |
| | ELSSLRSEDTAVYYCARELLG | | YYCQQSYSTSFTFGPGTKVDI | |
| | ESFDYWGQGTLVTVSS | | KR | |
| 162 | QVQLVQSGAEVKKPGASVKV | 1445 | DIQMTQSPSSLSASVGDRVTI | 1492 |
| | SCKASGYTFTNYGISWVRQAP | | TCRASQSISSYLAWYQQKPG | |
| | GQGLEWMGWINPNSGGTNFA | | KAPKLLIYAASTLQSGVPSRF | |
| | QKFQGRVTMTRDTSTSTVYM | | SGSGSGTDFTLTISSLQPEDFA | |
| | ELSSLRSEDTAVYYCARGTNG | | TYYCQQSYSTPLTFGQGTRLE | |
| | DELDYWGQGTLVTVSS | | IKR | |
| 163 | QVQLVQSGAEVKKPGASVKV | 1446 | DIQMTQSPSSLSASVGDRVTI | 1493 |
| | SCKASGYTFTSYYMQWVRQA | | TCRASQPIATWLAWYQQKPG | |
| | PGQGLEWMGWMNPNSGNTG | | KAPKLLIYDTSSLQSGVPSRFS | |
| | YAQKFQGRVTMTRDTSTSTV | | GSGSGTDFTLTISSLQPEDFAT | |
| | YMELSSLRSEDTAVYYCARAL | | YYCQQSYSLPLGFGQGTKVEI | |
| | YGDYLDIWGQGTTVTVSS | | KR | |
| 164 | QVQLVQSGAEVKKPGASVKV | 1447 | DIQMTQSPSSLSASVGDRVTI | 1494 |
| | SCKASGYTFTAHYIHWVRQAP | | TCQASQDISNFLNWYQQKPG | |
| | GQGLEWMGIINPNGGRTTYA | | KAPKLLIYATSTLQSGVPSRF | |
| | QKFQGRVTMTRDTSTSTVYM | | SGSGSGTDFTLTISSLQPEDFA | |
| | ELSSLRSEDTAVYYCARDSDF | | TYYCQQSYTTEWTFGQGTKV | |
| | WSGYYSDYYYGMDVWGQGT | | EIKR | |
| | TVTVSS | | | |
| 165 | QVQLVQSGAEVKKPGASVKV | 1448 | DIQMTQSPSSLSASVGDRVTI | 1495 |
| | SCKASGYTFTSYDINWVRQAP | | TCRASQFIANWLAWYQQKPG | |
| | GQGLEWMGWMNPNSGNTGY | | KAPKLLIYDASSLESGVPSRFS | |
| | AQKFQGRVTMTRDTSTSTVY | | GSGSGTDFTLTISSLQPEDFAT | |
| | MELSSLRSEDTAVYYCARLSS | | YYCQQSYSTPLTFGGGTKVEI | |
| | GYYPDYWGQGTLVTVSS | | KR | |
| 166 | QVQLVQSGAEVKKPGASVKV | 1449 | DIQMTQSPSSLSASVGDRVTI | 1496 |
| | SCKASGYTFESYDMNWVRQA | | TCRASQGISNWLAWYQQKPG | |
| | PGQGLEWMGWIDPHSGDTNF | | KAPKLLIYDASNLETGVPSRF | |
| | AQKFQGRVTMTRDTSTSTVY | | SGSGSGTDFTLTISSLQPEDFA | |
| | MELSSLRSEDTAVYYCARAD | | TYYCQQSYSTPYTFGQGTKV | |
| | YGGNADYWGQGTLVTVSS | | EIKR | |
| 167 | QVQLVQSGAEVKKPGASVKV | 1450 | DIQMTQSPSSLSASVGDRVTI | 1497 |
| | SCKASGYTFTSYYMHWVRQA | | TCRASQDISTWLAWYQQKPG | |
| | PGQGLEWMGWINPNSGGTNY | | KAPKLLIYAASSLQSGVPSRF | |
| | AQKFQGRVTMTRDTSTSTVY | | SGSGSGTDFTLTISSLQPEDFA | |
| | MELSSLRSEDTAVYYCARGTT | | TYYCQQSYSIPPTFGPGTKVD | |
| | GDDFDYWGQGTLVTVSS | | IKR | |
| 168 | QVQLVQSGAEVKKPGASVKV | 1451 | DIQMTQSPSSLSASVGDRVTI | 1498 |
| | SCKASGYTFTNYGISWVRQAP | | TCRASQSVNHWLAWYQQKP | |
| | GQGLEWMGWINPNSGGTNYA | | GKAPKLLIYAASTLQSGVPSR | |
| | QKFQGRVTMTRDTSTSTVYM | | FSGSGSGTDFTLTISSLQPEDF | |
| | ELSSLRSEDTAVYYCARVRSD | | ATYYCQQSYSLPLTFGGGTK | |
| | DFFDYWGQGTLVTVSS | | VEIKR | |
| 169 | QVQLVQSGAEVKKPGASVKV | 1452 | DIQMTQSPSSLSASVGDRVTI | 1499 |
| | SCKASGYTFTNDYIHWVRQAP | | TCRVSQGISSYLAWYQQKPG | |
| | GQGLEWMGWMSPNSGKTGF | | KAPKLLIYDASNLETGVPSRF | |
| | AQKFQGRVTMTRDTSTSTVY | | SGSGSGTDFTLTISSLQPEDFA | |
| | MELSSLRSEDTAVYYCAKDNS | | TYYCQQYDTLPITFGQGTRLE | |
| | SGWYFDLWGRGTLVTVSS | | IKR | |
| 170 | QVQLVQSGAEVKKPGASVKV | 1453 | DIQMTQSPSSLSASVGDRVTI | 1500 |
| | SCKASGGSFSNHGVSWVRQA | | TCRASQSISSWLAWYQQKPG | |
| | PGQGLEWMGWMNPNSGDTG | | KAPKLLIYEASTLQSGVPSRF | |
| | YAQKFQGRVTMTRDTSTSTV | | SGSGSGTDFTLTISSLQPEDFA | |
| | YMELSSLRSEDTAVYYCARPR | | TYYCQQSYSTPLTFGQGTKV | |
| | KDDAFAIWGQGTLVTVSS | | EIKR | |
| 171 | QVQLVQSGAEVKKPGASVKV | 1454 | DIQMTQSPSSLSASVGDRVTI | 1501 |
| | SCKASGYTFTDYYIHWVRQAP | | TCRASQSIGPWLAWYQQKPG | |
| | GQGLEWMGMVDPNTGNINY | | KAPKLLIYEASNLASGVPSRF | |
| | AQTFQGRVTMTRDTSTSTVY | | SGSGSGTDFTLTISSLQPEDFA | |
| | MELSSLRSEDTAVYYCTSGST | | TYYCQQSYSTPLTFGGGTKV | |
| | NDAFDIWGQGTMVTVSS | | EIKR | |
| 172 | QVQLVQSGAEVKKPGASVKV | 1455 | DIQMTQSPSSLSASVGDRVTI | 1502 |
| | SCKASGYTFSDYYVHWVRQA | | TCRASQSISSYLNWYQQKPG | |
| | PGQGLEWMGWMNPNSGNTG | | KAPKLLIYAASSLQSGVPSRF | |
| | YAQKFQGRVTMTRDTSTSTV | | SGSGSGTDFTLTISSLQPEDFA | |
| | YMELSSLRSEDTAVYYCARGL | | TYYCQQSYSTPLTFGGGTKV | |
| | TGDQFDYWGQGTLVTVSS | | EIKR | |
| 173 | QVQLVQSGAEVKKPGASVKV | 1456 | DIQMTQSPSSLSASVGDRVTI | 1503 |
| | SCKASGYTFNGYNMHWVRQ | | TCRASQSISTWLAWYQQKPG | |
| | APGQGLEWMGWINPNSGDTN | | KAPKLLIYDASSLRSGVPSRF | |
| | YAQKFQGRVTMTRDTSTSTV | | SGSGSGTDFTLTISSLQPEDFA | |
| | YMELSSLRSEDTAVYYCASLD | | TYYCQQSYSTPITFGQGTKVE | |
| | YGDYAVYWGQGTLVTVSS | | IKR | |
| 174 | EVQLLESGGGLVQPGGSLRLS | 1457 | DIQMTQSPSSLSASVGDRVTI | 1504 |
| | CAASGFIFRDHWMHWVRQAP | | TCRASQSISSWLAWYQQKPG | |
| | GKGLEWVSSIDFSTGYIYYAD | | KAPKLLIYAASSLQSGVPSRF | |
| | SVKGRFTISRDNSKNTLYLQM | | SGSGSGTDFTLTISSLQPEDFA | |
| | NSLRAEDTAVYYCARDPWGD | | TYYCQQTYTTPYTFGQGTRL | |
| | GDFDYWGRGTLVTVSS | | EIKR | |
| 175 | QVQLVQSGAEVKKPGASVKV | 1458 | DIQMTQSPSSLSASVGDRVTI | 1505 |
| | SCKASGYTFTSYDIHWVRQAP | | TCQASQDISNYLNWYQQKPG | |
| | GQGLEWMGWINPNSGNTGYA | | KAPKLLIYDASNLETGVPSRF | |
| | QKFQGRVTMTRDTSTSTVYM | | SGSGSGTDFTLTISSLQPEDFA | |
| | ELSSLRSEDTAVYYCAGGPDV | | TYYCQQADGFPPTFGGGTKV | |
| | DAAMVLDYWGQGTLVTVSS | | EIKR | |
| 176 | QVQLVQSGAEVKKPGASVKV | 1459 | DIQMTQSPSSLSASVGDRVTI | 1506 |
| | SCKASGGSFTSYYIHWVRQAP | | TCRASQNIDTWLAWYQQKP | |
| | GQGLEWVGWMNPNSGNTGY | | GKAPKLLIYDGSNLEAGVPSR | |
| | AQKFQGRVTMTRDTSTSTVY | | FSGSGSGTDFTLTISSLQPEDF | |
| | MELSSLRSEDTAVYYCARGAT | | ATYYCQQSYNTPITFGQGTRL | |
| | DDAFDIWGQGTMVTVSS | | EIKR | |
| 177 | QVQLVQSGAEVKKPGASVKV | 1460 | DIQMTQSPSSLSASVGDRVTI | 1507 |
| | SCKASGYTFTSYYMHWVRQA | | TCRASQSISNWLAWYQQKPG | |
| | PGQGLEWMGWMNPNSGNTG | | KAPKLLIYDASNLETGVPSRF | |
| | YAQKFQGRVTMTRDTSTSTV | | SGSGSGTDFTLTISSLQPEDFA | |
| | YMELSSLRSEDTAVYYCARST | | TYYCQQSYSTPLTFGQGTKLE | |
| | YSDSFDYWGQGTLVTVSS | | IKR | |
| 178 | EVQLLESGGGLVQPGGSLRLS | 1461 | DIQMTQSPSSLSASVGDRVTI | 1508 |
| | CAASGFTFSSSDMSWVRQAPG | | TCRVSQGISSYLNWYQQKPG | |
| | KGLEWVSSITGSGDGTYYADS | | KAPKLLIYDASNLETGVPSRF | |
| | VKGRFTISRDNSKNTLYLQMN | | SGSGSGTDFTLTISSLQPEDFA | |
| | SLRAEDTAVYYCIRDWEGIYQ | | TYYCQQGYSTPWTFGQGTKL | |
| | WGQGTLVTVSS | | EIKR | |
| 179 | QVQLVQSGAEVKKPGASVKV | 1462 | DIQMTQSPSSLSASVGDRVTI | 1509 |
| | SCKASGGTFSSYAISWVRQAP | | TCQASQDISNYLNWYQQKPG | |
| | GQGLEWMGTINPSGGSTNYA | | KAPKLLIYDASNLETGVPSRF | |
| | QKFQGRVTMTRDTSTSTVYM | | SGSGSGTDFTLTISSLQPEDFA | |
| | ELSSLRSEDTAVYYCAIGGYD | | TYYCQQGYSPPWTFGGGTKV | |
| | SPYMDVWGKGTTVTVSS | | EIKR | |
| 180 | QVQLVQSGAEVKKPGASVKV | 1463 | DIQMTQSPSSLSASVGDRVTI | 1510 |
| | SCKASGYTFTSLDINWVRQAP | | TCRASQSISPWLAWYQQKPG | |
| | GQGLEWMGSMNPRSGSTAYA | | KAPKLLIYDASNLQSGVPSRF | |
| | QSFQGRVTMTRDTSTSTVYM | | SGSGSGTDFTLTISSLQPEDFA | |
| | ELSSLRSEDTAVYYCAKSDYG | | TYYCQQSYSTPLTFGQGTKLE | |
| | DYLDYWGQGTLVTVSS | | IKR | |
| 181 | QVQLVQSGAEVKKPGASVKV | 1464 | DIQMTQSPSSLSASVGDRVTI | 1511 |
| | SCKASGYTFTGYYMHWVRQA | | TCRASQTISSWLAWYQQKPG | |
| | PGQGLEWMGVINPSGGSTSYA | | KAPKLLIYAASTLQSGVPSRF | |
| | QKFQGRVTMTRDTSTSTVYM | | SGSGSGTDFTLTISSLQPEDFA | |
| | ELSSLRSEDTAVYYCARGRTD | | TYYCQQSYSIPLTFGGGTKLE | |
| | DAFDIWGQGTLVTVSS | | IKR | |
| 182 | QVQLVQSGAEVKKPGASVKV | 1465 | DIQMTQSPSSLSASVGDRVTI | 1512 |
| | SCKASGYTFTDYYMHWVRQA | | TCRASQNIGPWLAWYQQKPG | |
| | PGQGLEWLGIINTGAGTTNYA | | KAPKLLIYEAFTLQSGVPSRF | |
| | PKFQGRVTMTRDTSTSTVYM | | SGSGSGTDFTLTISSLQPEDFA | |
| | ELSSLRSEDTAVYYCARGLTS | | TYYCQQSDNIPITFGQGTKVE | |
| | DHFDYWGQGTLVTVSS | | IKR | |
| 183 | QVQLVQSGAEVKKPGSSVKV | 1466 | DIQMTQSPSSLSASVGDRVTI | 1513 |
| | SCKASGGTFSSYAISWVRQAP | | TCRASQSISSWLAWYQQKPG | |
| | GQGLEWMGGIIPKFGPPNYAP | | KAPKLLIYAASSLQRGVPSRF | |
| | KFQGRVTITADESTSTAYMEL | | SGSGSGTDFTLTISSLQPEDFA | |
| | SSLRSEDTAVYYCARNSYGDD | | TYYCQQSYSTPLTFGQGTKV | |
| | FDYWGQGTLVTVSS | | EIKR | |
| 184 | QVQLVQSGAEVKKPGASVKV | 1467 | DIQMTQSPSSLSASVGDRVTI | 1514 |
| | SCKASGGTFGNYGINWVRQA | | TCRASQSISRYLNWYQQKPG | |
| | PGQGLEWMGVINPSSGGTNL | | KAPKLLIYDASNLETGVPSRF | |
| | AQKFQGRVTMTRDTSTSTVY | | SGSGSGTDFTLTISSLQPEDFA | |
| | MELSSLRSEDTAVYYCARSLG | | TYYCQQSYSTPWTFGQGTKL | |
| | WPSPYMDVWGQGTMVTVSS | | EIKR | |
| 185 | EVQLLESGGGLVQPGGSLRLS | 1468 | DIQMTQSPSSLSASVGDRVTI | 1515 |
| | CAASGFTFSNSDMYWVRQAP | | TCRASQDIRNDLGWYQQKPG | |
| | GKGLEWVSAISGSDGTTYYA | | KAPKLLIYDASNLQTGVPSRF | |
| | DSVKGRFTISRDNSKNTLYLQ | | SGSGSGTDFTLTISSLQPEDFA | |
| | MNSLRAEDTAVYYCARDDYG | | TYYCQQSYNMPYTFGQGTKL | |
| | DQGFDLWGRGTLVTVSS | | EIKR | |
| 186 | QVQLVQSGAEVKKPGASVKV | 1469 | DIQMTQSPSSLSASVGDRVTI | 1516 |
| | SCKASGYTFTKYYMHWVRQA | | TCQASQDISNYLNWYQQKPG | |
| | PGQGLEWMGWINPNSGNTGY | | KAPKLLIYDATNLETGVPSRF | |
| | AQKFQGRVTMTRDTSTSTVY | | SGSGSGTDFTLTISSLQPEDFA | |
| | MELSSLRSEDTAVYYCARDIA | | TYYCQQSYSTPPTFGGGTKV | |
| | VAGSTYYYYGMDVWGQGTT | | EIKR | |
| | VTVSS | | | |
| 187 | EVQLLESGGGLVQPGGSLRLS | 1470 | DIQMTQSPSSLSASVGDRVTI | 1517 |
| | CAASGFTFSSYDMHWVRQAP | | TCQASQDISNYLNWYQQKPG | |
| | GKGLEWVSSISSSSSYIYYADS | | KAPKLLIYGASSLQSGVPSRF | |
| | VKGRFTISRDNSKNTLYLQMN | | SGSGSGTDFTLTISSLQPEDFA | |
| | SLRAEDTAVYYCARDIDDVA | | TYYCQQSYSTPFTFGQGTKLE | |
| | GDYWGQGTLVTVSS | | IKR | |
| 188 | EVQLLESGGGLVQPGGSLRLS | 1471 | DIQMTQSPSSLSASVGDRVTI | 1518 |
| | CAASGFTFSSYGMHWVRQAP | | TCQASQDISNYLNWYQQKPG | |
| | GKGLEWVSYTSSSSSTIYYAD | | KAPKLLIYDASNLETGVPSRF | |
| | SVKGRFTISRDNSKNTLYLQM | | SGSGSGTDFTLTISSLQPEDFA | |
| | NSLRAEDTAVYYCARGNVGD | | TYYCQQTYDTPYTFGQGTKL | |
| | NWNDDEAFLGWGQGTLVTVS | | EIKR | |
| | S | | | |
| 189 | EVQLLESGGGLVQPGGSLRLS | 1472 | DIQMTQSPSSLSASVGDRVTI | 1519 |
| | CAASGLTAGSNYMSWVRQAP | | TCRASQGISDYLAWYQQKPG | |
| | GKGLEWVSAISDDGHWTDYA | | KAPKLLIYGASSLQSGVPSRF | |
| | DSVKGRFTISRDNSKNTLYLQ | | SGSGSGTDFTLTISSLQPEDFA | |
| | MNSLRAEDTAVYYCVKDDGE | | TYYCQQSYSTPWTFGPGTKV | |
| | GSGIDWGQGTLVTVSS | | DIKR | |
| 190 | EVQLLESGGGLVQPGGSLRLS | 1473 | EIVMTQSPATLSVSPGERATL | 1520 |
| | CAASGFTFSSSWMHWVRQAP | | SCRASQSVSSSYLAWYQQKP | |
| | GKGLEWVSTINTNGDAAYYA | | GQAPRLLIYGASTRAAGIPAR | |
| | DSVKGRFTISRDNSKNTLYLQ | | FSGSGSGTEFTLTISSLQSEDF | |
| | MNSLRAEDTAVYYCARDTVL | | AVYYCQQYGSSPFTFGPGTK | |
| | DDYGDYDDYGMDVWGQGTT | | VDIKR | |
| | VTVSS | | | |
| 194 | QVQLVQSGAEVKKPGASVKV | 2045 | DIQMTQSPSSLSASVGDRVTI | 2052 |
| | SCKASGVTFSNSGINWVRQAP | | TCRASQSISSWLAWYQQKPG | |
| | GQGLEWMGWMNPASGDTGY | | KAPKLLIYDASSLESGVPSRFS | |
| | AQKFQGRVTMTRDTSTSTVY | | GSGSGTDFTLTISSLQPEDFAT | |
| | MELSSLRSEDTAVYYCARGEY | | YYCQQSHSLPPTFGQGTRLEI | |
| | GAEYFQHWGQGTLVTVSS | | KR | |
| 195 | QVQLVQSGAEVKKPGASVKV | 2046 | DIQMTQSPSSLSASVGDRVTI | 2053 |
| | SCKASGYTFTNSYIHWVRQAP | | TCRASQGISNWLAWYQQKPG | |
| | GQGLEWMGIINPSGDSTTYAQ | | KAPKLLIYDASNLETGVPSRF | |
| | KFQGRVTMTRDTSTSTVYME | | SGSGSGTDFTLTISSLQPEDFA | |
| | LSSLRSEDTAVYYCAKPTTGD | | TYYCQQSYSTPLTFGGGTKV | |
| | GMDVWGQGTTVTVSS | | EIKR | |
| 196 | QVQLVQSGAEVKKPGASVKV | 2047 | DIQMTQSPSSLSASVGDRVTI | 2054 |
| | SCKASGYTLTNYYMHWVRQ | | TCRASRSIRSYLNWYQQKPG | |
| | APGQGLEWMGWISPTDGKTK | | KAPKLLIYDASNLETGVPSRF | |
| | YAQKFQGRVTMTRDTSTSTV | | SGSGSGTDFTLTISSLQPEDFA | |
| | YMELSSLRSEDTAVYYCTTDL | | TYYCQQSYNTPWTFGQGTKV | |
| | LGDWFDPWGQGTLVTVSS | | EIKR | |
| 197 | QVQLVQSGAEVKKPGASVKV | 2048 | DIQMTQSPSSLSASVGDRVTI | 2055 |
| | SCKASGYTLTNNWMHWVRQ | | TCRASQSISTWLAWYQQKPG | |
| | APGQGLEWMGWMNPNSGNT | | KAPKLLIYGASSLQSGVPSRF | |
| | GYAQKFQGRVTMTRDTSTST | | SGSGSGTDFTLTISSLQPEDFA | |
| | VYMELSSLRSEDTAVYYCAT | | TYYCQQSYDIPITFGPGTKVDI | |
| | ATADDAFDIWGQGTMVTVSS | | KR | |
| 198 | EVQLLESGGGLVQPGGSLRLS | 2049 | DIQMTQSPSSLSASVGDRVTI | 2056 |
| | CAASGFTFSTFWMSWVRQAP | | TCRASQSISSYLNWYQQKPG | |
| | GKGLEWVATISYDGSNQYYA | | KAPKLLIYDASNLETGVPSRF | |
| | DSVKGRFTISRDNSKNTLYLQ | | SGSGSGTDFTLTISSLQPEDFA | |
| | MNSLRAEDTAVYYCARLELH | | TYYCQQANSFPFTFGPGTKV | |
| | EGRFDYWGQGTLVTVSS | | DIKR | |
| 199 | QVQLVQSGAEVKKPGASVKV | 2050 | DIQMTQSPSSLSASVGDRVTI | 2057 |
| | SCKASGDTFTGYHIHWVRQAP | | TCRASQSVSSWLAWYQQKP | |
| | GQGLEWMGWMNPDSGSTGY | | GKAPKLLIYDASSLQSGVPSR | |
| | AQKFQGRVTMTRDTSTSTVY | | FSGSGSGTDFTLTISSLQPEDF | |
| | MELSSLRSEDTAVYYCTTDRL | | ATYYCQQANSFPFTFGPGTK | |
| | YGDYFDYWGQGTLVTVSS | | VDIKR | |
| 200 | QVQLVQSGAEVKKPGASVKV | 2051 | DIQMTQSPSSLSASVGDRVTI | 2058 |
| | SCKASGYTFTDYYMHWVRQA | | TCQASQDISNYLNWYQQKPG | |
| | PGQGLEWMGWMNPNSGNTG | | KAPKLLIYEASSLQSGVPSRFS | |
| | YAQKFQGRVTMTRDTSTSTV | | GSGSGTDFTLTISSLQPEDFAT | |
| | YMELSSLRSEDTAVYYCAAD | | YYCQQTYSPPPTFGQGTKLEI | |
| | DTKSPYGMDVWGQGTMVTV | | KR | |
| | SS | | | |

[1364] The polypeptides above were tested as disclosed above in Example 4. Data is disclosed below in Table 17c, reporting FACS fold change over parental as (−), indicating <2 fold; (+), indicating 2-10 fold; (++), indicating 10-30 fold; and (+++), indicating >30 fold.

TABLE 17c
Polypeptide Activity (FACS)

| | CLL-1 K244 | CLL-1 Q244 |
|---|---|---|
| | BLI/Octet | BLI/Octet |
| | Binding Summary | Binding Summary |
| Polypeptide No. | (Yes/No/Ambiguous) | (Yes/No/Ambiguous) |
| 144 | Yes | Yes |
| 145 | Yes | Yes |
| 146 | Yes | Yes |
| 147 | Yes | Yes |
| 148 | Yes | Yes |
| 149 | Yes | Yes |
| 150 | Yes | Yes |
| 151 | Yes | Yes |
| 152 | Yes | Yes |
| 153 | Yes | Yes |
| 154 | Yes | Yes |
| 155 | Yes | Yes |
| 156 | Yes | Yes |
| 157 | Yes | Yes |
| 158 | Yes | Yes |
| 159 | Yes | Yes |
| 160 | Yes | Yes |
| 161 | Yes | Yes |
| 162 | Yes | Yes |
| 163 | Yes | Yes |
| 164 | Yes | Yes |
| 165 | Yes | Yes |
| 166 | Yes | Yes |
| 167 | Yes | Yes |
| 168 | Yes | Yes |
| 169 | Yes | Yes |
| 170 | Yes | Yes |
| 171 | Yes | Yes |
| 172 | Yes | Yes |
| 173 | Yes | Yes |
| 174 | Yes | Yes |
| 175 | Yes | Yes |
| 176 | Yes | Yes |
| 177 | Yes | Yes |
| 178 | Yes | Yes |
| 179 | Yes | Yes |
| 180 | Yes | Yes |
| 181 | Yes | Yes |
| 182 | Yes | Yes |
| 183 | Yes | Yes |
| 184 | Yes | Yes |
| 185 | Yes | Yes |
| 186 | Yes | Yes |
| 187 | Yes | Yes |
| 188 | Yes | Yes |
| 189 | Yes | Yes |
| 190 | Yes | Yes |
| 194 | Yes | Yes |
| 195 | Yes | Yes |
| 196 | No | Yes |
| 197 | Yes | Yes |
| 198 | Yes | No |
| 199 | Yes | No |
| 200 | Yes | No |

### Example 19: Identification of Non-Selective Anti-Human FLT3 scFv Clones

[1365] The methods above in Example 1 have been used to discover non-selective anti-human FLT3 scFv clones. Anti-human FLT-3 scFv clones were discovered by standard screening methodologies of a human antibody library using two recombinant polymorphic forms of human FLT3 extracellular domain antigens (huFLT3-T227 and huFLT3-M227). Using these antigens various panning tactics were employed to encourage enrichment of thermostable clones of desired affinity range. The scFvs were screened for binding to two single nucleotide polymorphism (SNP) variants of human FLT-3 (Threonine 227 and Methionine 227) by flow cytometry and bio-layer interferometry (BLI).

TABLE 18a
Sequences of Non-Selective Anti-FLT3 Polypeptides (CDR Sequences)

| Poly- | | | | | | | | | | | | |
|---|---|---|---|---|---|---|---|---|---|---|---|---|
| peptide | | SEQ ID | | SEQ ID | | SEQ ID | | SEQ ID | | SEQ ID | | SEQ ID |
| No. | HCDR1 | NO | HCDR2 | NO | HCDR3 | NO | LCDR1 | NO | LCDR2 | NO | LCDR3 | NO |
| 201 | GTFSS | 2059 | GWISA | 2153 | CARGG | 2247 | RASHN | 2341 | GATTL | 2435 | CQQAN | 2529 |
| | DGIS | | YHGHT | | KHSGS | | IGNKL | | QS | | SFPRTF | |
| | | | NYA | | HRSYY | | A | | | | | |
| | | | | | YGMD | | | | | | | |
| | | | | | VW | | | | | | | |
| 202 | YTFTN | 2060 | GVINPS | 2154 | CARAG | 2248 | RASQSI | 2342 | DASNL | 2436 | CQQIY | 2530 |
| | YYMH | | GGSTN | | VGAFH | | RSWLA | | ET | | SLPRTF | |
| | | | YA | | IW | | | | | | | |
| 203 | YTLTE | 2061 | GRIIPIS | 2155 | CARAA | 2249 | KSSQS | 2343 | WASTR | 2437 | CQQYY | 2531 |
| | LSMH | | GTANY | | RYCSS | | VLYSS | | AS | | STPQTF | |
| | | | A | | TSCYW | | NNKNY | | | | | |
| | | | | | RDGM | | LA | | | | | |
| | | | | | DVW | | | | | | | |
| 204 | FDFST | 2062 | SGISGS | 2156 | CARVY | 2250 | RASQSI | 2344 | DASSL | 2438 | CQQSY | 2532 |
| | YNMF | | GRSKY | | YDSSG | | GSNLD | | QS | | STPYTF | |
| | | | YA | | YYPYY | | | | | | | |
| | | | | | FDYW | | | | | | | |
| 205 | GSFISH | 2063 | GGIIPIS | 2157 | CAKGR | 2251 | RSSQS | 2345 | AASSL | 2439 | CMQAL | 2533 |
| | TFS | | GTANY | | GQLVG | | LLHSN | | QS | | QTPLTF | |
| | | | A | | GYFQH | | GYNYL | | | | | |
| | | | | | W | | D | | | | | |
| 206 | YTFTS | 2064 | GGIIPIF | 2158 | CARED | 2252 | RASQA | 2346 | AASNL | 2440 | CQQSY | 2534 |
| | YYLH | | GKAEY | | FWSGP | | ISSYLA | | QG | | STPLTF | |
| | | | S | | YGMD | | | | | | | |
| | | | | | VW | | | | | | | |
| 207 | YTFTN | 2065 | GWMN | 2159 | CAKSH | 2253 | QASHD | 2347 | AASIL | 2441 | CQQSY | 2535 |
| | YYMH | | PNSGN | | YYYFY | | ISKYLN | | QS | | STPYTF | |
| | | | TGYA | | GMDV | | | | | | | |
| | | | | | W | | | | | | | |
| 208 | GTFSS | 2066 | GIINPS | 2160 | CAKD | 2254 | RASQS | 2348 | DVSSR | 2442 | CQQYA | 2536 |
| | RSIS | | GGGTL | | MDGW | | LSNIYL | | AA | | TSPLTF | |
| | | | YA | | SDAFDI | | A | | | | | |
| | | | | | W | | | | | | | |
| 209 | FAFSS | 2067 | AGIWV | 2161 | CAREF | 2255 | RASQSI | 2349 | DASKL | 2443 | CQQSY | 2537 |
| | YVLH | | DGHNK | | GAAGS | | STWLA | | ET | | TTPYTF | |
| | | | DYA | | FQHW | | | | | | | |
| 210 | YTLTE | 2068 | GGIIPIS | 2162 | CARAS | 2256 | KSSQS | 2350 | WASTR | 2444 | CHQYY | 2538 |
| | LSMH | | GTTKY | | PRYYM | | VFYSS | | AS | | SKPPTF | |
| | | | A | | DVW | | NNKNY | | | | | |
| | | | | | | | LA | | | | | |
| 211 | FTFSN | 2069 | SAIGA | 2163 | CAKSS | 2257 | RASQG | 2351 | AASTL | 2445 | CQQYG | 2539 |
| | HYMS | | GGGTY | | GYSYG | | ISNNLA | | HN | | RSPKT | |
| | | | YA | | RRPFD | | | | | | F | |
| | | | | | YW | | | | | | | |
| 212 | YTFTG | 2070 | GGIIPIL | 2164 | CARAP | 2258 | RASQS | 2352 | DTSTR | 2446 | CQQYD | 2540 |
| | YYMH | | GTANN | | WGTFD | | VSSSQ | | AT | | NSLWT | |
| | | | A | | YW | | LA | | | | F | |
| 213 | YTFSR | 2071 | GWMN | 2165 | CARTR | 2259 | RASQSI | 2353 | DASNL | 2447 | CQQSY | 2541 |
| | YYMS | | PNSGN | | FAAQP | | SSYLN | | KT | | STPLTF | |
| | | | TGYA | | HNWH | | | | | | | |
| | | | | | FDLW | | | | | | | |
| 214 | YTFTT | 2072 | GIINPS | 2166 | CARDR | 2260 | RASQG | 2354 | AASSL | 2448 | CQQSY | 2542 |
| | YYMH | | GGSTS | | AARPR | | IRNHL | | QS | | STPTF | |
| | | | YA | | GGFDY | | A | | | | | |
| | | | | | W | | | | | | | |
| 215 | YTFTG | 2073 | GWINP | 2167 | CAKGG | 2261 | RASQG | 2355 | AASTL | 2449 | CQQSY | 2543 |
| | YRMH | | NSGGT | | LDWR | | ISSYLA | | QS | | STPLTF | |
| | | | NYA | | NWYF | | | | | | | |
| | | | | | DLW | | | | | | | |
| 216 | NTFTM | 2074 | GAIIPIS | 2168 | CARLS | 2262 | RSSQS | 2356 | LGSNR | 2450 | CMQAL | 2544 |
| | YYMH | | GTVIY | | GGRM | | LLHSN | | AS | | QTPLTF | |
| | | | A | | YDAFD | | GYNYL | | | | | |
| | | | | | IW | | D | | | | | |
| 217 | YTFTTF | 2075 | GGIIPM | 2169 | CASGG | 2263 | KSSQS | 2357 | WASTR | 2451 | CQQYY | 2545 |
| | YLH | | SGTAN | | ENGM | | VLYSV | | ES | | SAPPTF | |
| | | | YA | | DVW | | NNKNY | | | | | |
| | | | | | | | LA | | | | | |
| 218 | YSFTT | 2076 | GIINPS | 2170 | CARGS | 2264 | RASQSI | 2358 | AASSL | 2452 | CQQAI | 2546 |
| | HYMH | | GGSTR | | SYYYY | | STWLA | | QS | | SFPLTF | |
| | | | YA | | GVDV | | | | | | | |
| | | | | | W | | | | | | | |
| 219 | YTFTN | 2077 | GIINPS | 2171 | CARDR | 2265 | RASQG | 2359 | KASSL | 2453 | CLQHN | 2547 |
| | YYMH | | SGSAS | | STLVP | | IRSELS | | ES | | SYPLTF | |
| | | | YT | | LDYW | | | | | | | |
| 220 | YTFTG | 2078 | GIINPR | 2172 | CARGS | 2266 | RASQG | 2360 | AASSL | 2454 | CQQAN | 2548 |
| | YYMY | | GGITS | | TSSGW | | IRNDL | | QS | | RFPPTF | |
| | | | YA | | PNGDM | | G | | | | | |
| | | | | | DVW | | | | | | | |
| 221 | YTFTD | 2079 | GWMT | 2173 | CALGD | 2267 | RSSQS | 2361 | GASYL | 2455 | CMQAL | 2549 |
| | NYMH | | PDSNN | | GPFGM | | LLHSN | | QS | | QGPITF | |
| | | | TGFA | | DVW | | GYNYL | | | | | |
| | | | | | | | D | | | | | |
| 222 | YSFTA | 2080 | GIINPS | 2174 | CARVA | 2268 | RASQD | 2362 | AASTL | 2456 | CQQSY | 2550 |
| | YYMH | | GGSTS | | GINGE | | ISNYLA | | QS | | RTPYT | |
| | | | YA | | MAYW | | | | | | F | |
| 223 | YTFTN | 2081 | GIINPS | 2175 | CAKAL | 2269 | RASQG | 2363 | DGSNL | 2457 | CQQSY | 2551 |
| | SFIH | | GGSTS | | ERRYY | | ISNYLA | | ET | | STPLTF | |
| | | | YA | | YGMD | | | | | | | |
| | | | | | VW | | | | | | | |
| 224 | YTFTG | 2082 | GVINPI | 2176 | CAKAI | 2270 | RASQS | 2364 | DTSSR | 2458 | CQQYA | 2552 |
| | YYMH | | YGTAN | | SSGWS | | VSSDF | | AS | | GPPTF | |
| | | | YA | | NDAFD | | LA | | | | | |
| | | | | | IW | | | | | | | |
| 225 | YTLTE | 2083 | GGIVP | 2177 | CARRR | 2271 | KSSQS | 2365 | SSSTRE | 2459 | CQQYY | 2553 |
| | LSIH | | MSGTA | | DGYNS | | LLYGS | | S | | TTPYTF | |
| | | | SYA | | W | | KNYIS | | | | | |
| 226 | YTFTG | 2084 | GIIDPS | 2178 | CARDR | 2272 | RASQG | 2366 | GASNL | 2460 | CQQSY | 2554 |
| | YYMH | | GGSTS | | SLLWS | | ISNYLA | | QS | | GTPYT | |
| | | | YA | | GVGG | | | | | | F | |
| | | | | | MDVW | | | | | | | |
| 227 | YTLNE | 2085 | GGIIPM | 2179 | CAKGV | 2273 | RASQS | 2367 | GASNL | 2461 | CQQSY | 2555 |
| | LFMH | | SGTTF | | RQYSY | | VSSYL | | QS | | TTPWT | |
| | | | YA | | GRYYY | | N | | | | F | |
| | | | | | GMDV | | | | | | | |
| | | | | | W | | | | | | | |
| 228 | GTFSS | 2086 | GWINP | 2180 | CAKDS | 2274 | RASQSI | 2368 | AASRL | 2462 | CQQSY | 2556 |
| | HAIS | | GSGGT | | YDFWS | | YTHLN | | QT | | SFPFTF | |
| | | | NYA | | GYYID | | | | | | | |
| | | | | | YW | | | | | | | |
| 229 | YTFTN | 2087 | GIINPS | 2181 | CARGV | 2275 | RASQG | 2369 | AASSL | 2463 | CQQSH | 2557 |
| | YYMH | | GGSTS | | GYSGY | | ISNSLA | | QS | | SPPYTF | |
| | | | YA | | GADL | | | | | | | |
| | | | | | W | | | | | | | |
| 230 | GTFSS | 2088 | GGIIPL | 2182 | CARVL | 2276 | RASQS | 2370 | DVSTR | 2464 | CQHYG | 2558 |
| | NAIN | | FGTTN | | SGWY | | VSADY | | AS | | SSQVT | |
| | | | YA | | GTYYF | | IA | | | | F | |
| | | | | | DYW | | | | | | | |
| 231 | YTFTS | 2089 | GLINPS | 2183 | CARGL | 2277 | RASQSI | 2371 | AASNL | 2465 | CQQSY | 2559 |
| | YYIH | | GGSTT | | GWGV | | STYLN | | QS | | SSPLTF | |
| | | | YA | | VVPAA | | | | | | | |
| | | | | | ELDYW | | | | | | | |
| 232 | YTFTS | 2090 | GGIIPIF | 2184 | CTRSN | 2278 | RASQN | 2372 | AASSL | 2466 | CQQYS | 2560 |
| | YGIH | | GTASY | | GIAAA | | IANSLN | | QS | | SYPPTF | |
| | | | A | | GTHW | | | | | | | |
| | | | | | YFDLW | | | | | | | |
| 233 | YTFTS | 2091 | GVINPS | 2185 | CARGI | 2279 | RSSQS | 2373 | AASSL | 2467 | CMQGL | 2561 |
| | | | GGSTT | | GYGGY | | LLHSN | | | | RTPHT | |
| | YYLH | | YA | | FDYW | | GYNYL | | QS | | F | |
| | | | | | | | D | | | | | |
| 234 | HTFTA | 2092 | GWMS | 2186 | CARAT | 2280 | KSSQS | 2374 | WASIR | 2468 | CQQYY | 2562 |
| | YYMH | | PYSGN | | RGTIQ | | VLYSS | | ES | | TTPITF | |
| | | | TGYA | | HW | | NNKNY | | | | | |
| | | | | | | | LA | | | | | |
| 235 | YTFTG | 2093 | GIINPS | 2187 | CARDP | 2281 | RASQS | 2375 | GASTR | 2469 | CQQYG | 2563 |
| | YYMH | | GGSTS | | GRLGE | | VSSNL | | AT | | SSPLTF | |
| | | | YA | | LDYW | | A | | | | | |
| 236 | GTFSS | 2094 | GGIIPIL | 2188 | CAHVD | 2282 | RASQS | 2376 | DVSSR | 2470 | CQQLD | 2564 |
| | YAIS | | GIANY | | GYGM | | VSSNL | | AT | | AYPLT | |
| | | | A | | DVW | | A | | | | F | |
| 237 | YTFTS | 2095 | GLINPS | 2189 | CARSG | 2283 | RSSQS | 2377 | AASTL | 2471 | CMQAL | 2565 |
| | YYMH | | SGSTS | | SGGSY | | LLHSN | | QS | | QTPLTF | |
| | | | YA | | FLFDY | | GYNYL | | | | | |
| | | | | | W | | D | | | | | |
| 238 | YTFTIY | 2096 | GIINPS | 2190 | CARGI | 2284 | RSSQS | 2378 | LGSNR | 2472 | CMQGL | 2566 |
| | YMH | | GGSTV | | GSKGA | | LLHSN | | AS | | QTPYT | |
| | | | YA | | FDIW | | GYNYL | | | | F | |
| | | | | | | | D | | | | | |
| 239 | GTFSS | 2097 | GGIIPIL | 2191 | CARTM | 2285 | RASQS | 2379 | DVSTR | 2473 | CHQYG | 2567 |
| | YAIS | | GTANY | | TTVTY | | VGSSY | | AA | | SSPYTF | |
| | | | A | | YDAFD | | LA | | | | | |
| | | | | | IW | | | | | | | |
| 240 | YTFTS | 2098 | GIINPS | 2192 | CARGL | 2286 | RASQSI | 2380 | AASSL | 2474 | CQQSY | 2568 |
| | YYMH | | SGSTT | | GKSAI | | SSYLN | | QS | | STPLTF | |
| | | | YA | | DYW | | | | | | | |
| 241 | YTFTR | 2099 | GIINPS | 2193 | CARSY | 2287 | RASQSI | 2381 | AASSL | 2475 | CQQSY | 2569 |
| | HYVH | | GGSTS | | HHYYY | | SNYLA | | QG | | STPWT | |
| | | | YA | | GMDV | | | | | | F | |
| | | | | | W | | | | | | | |
| 242 | GTFSS | 2100 | GGIIPM | 2194 | CARDA | 2288 | RASES | 2382 | GASTR | 2476 | CQQYG | 2570 |
| | ATIS | | FGTAN | | YGDST | | VSSAL | | AT | | NSVTF | |
| | | | YA | | W | | A | | | | | |
| 243 | GTFSS | 2101 | GGISP | 2195 | CARAP | 2289 | RASQT | 2383 | DTSSR | 2477 | CHHYG | 2571 |
| | HAFN | | MFGTP | | DYGDD | | LTGGL | | AA | | SSPYTF | |
| | | | NYA | | WYFDL | | LA | | | | | |
| | | | | | W | | | | | | | |
| 244 | YTFTS | 2102 | GRINPS | 2196 | CARVP | 2290 | RASQD | 2384 | AASSL | 2478 | CQQSY | 2572 |
| | YYMH | | GGSTS | | GLYGG | | IRNDL | | QS | | SSPFTF | |
| | | | YA | | AIDYW | | G | | | | | |
| 245 | YTFTG | 2103 | GGVIPF | 2197 | CAYGA | 2291 | RASQS | 2385 | GASTR | 2479 | CQQYS | 2573 |
| | FYIH | | FSRTIY | | NGHLY | | VSSSY | | AT | | SSPLTF | |
| | | | A | | GMDA | | LA | | | | | |
| | | | | | W | | | | | | | |
| 246 | GTFTS | 2104 | GGIIPM | 2198 | CAAGL | 2292 | QATQD | 2386 | GASNL | 2480 | CQQSY | 2574 |
| | YFMH | | FGAPV | | DFWSG | | ISNYLN | | PS | | SDLLTF | |
| | | | YA | | PDNYY | | | | | | | |
| | | | | | MDVW | | | | | | | |
| 247 | GTLMS | 2105 | GIINPR | 2199 | CARSE | 2293 | RGSQSI | 2387 | DTSAR | 2481 | CQQYN | 2575 |
| | YAIS | | GGTTR | | DSGYD | | SGNYL | | AA | | SYPLTF | |
| | | | YA | | YLDY | | A | | | | | |
| | | | | | W | | | | | | | |
| 248 | YTFTG | 2106 | GVINP | 2200 | CAREG | 2294 | RASQD | 2388 | AASSL | 2482 | CQQYY | 2576 |
| | YYMH | | NGGSIS | | WFGED | | LDRYL | | QT | | STPYTF | |
| | | | YA | | GMDV | | A | | | | | |
| | | | | | W | | | | | | | |
| 249 | YTFTS | 2107 | GWMN | 2201 | CATAV | 2295 | RASQSI | 2389 | DTSAH | 2483 | CQHYG | 2577 |
| | DGIS | | PNSGN | | AGTDA | | GNNLK | | TT | | NSLTF | |
| | | | AGYA | | FDIW | | A | | | | | |
| 250 | YTLTSF | 2108 | GRIIPM | 2202 | CASTS | 2296 | RASQS | 2390 | GASTR | 2484 | CQQYG | 2578 |
| | AMH | | SGTAN | | PDQYY | | VGSSS | | AT | | SSPYTF | |
| | | | YA | | YGMD | | LA | | | | | |
| | | | | | VW | | | | | | | |
| 251 | GTFSS | 2109 | GGIIPI | 2203 | CAKGL | 2297 | RASQS | 2391 | DVSTR | 2485 | CQQYG | 2579 |
| | DAIN | | VGTPT | | AFGVF | | VSSNY | | AT | | SSTLTF | |
| | | | YA | | DGLDV | | LA | | | | | |
| | | | | | W | | | | | | | |
| 252 | YTLTD | 2110 | GGIIPM | 2204 | CARSS | 2298 | RASQSI | 2392 | AASSL | 2486 | CQQSY | 2580 |
| | LSIH | | SGTAN | | SSWPK | | SSYLN | | QS | | STPLTF | |
| | | | YA | | YFQH | | | | | | | |
| | | | | | W | | | | | | | |
| 253 | YTFTT | 2111 | GGIVP | 2205 | CASSA | 2299 | RASQD | 2393 | AASSL | 2487 | CQQYD | 2581 |
| | YFMH | | VFGTT | | VGWF | | ISRWL | | QS | | NFPLTF | |
| | | | KYA | | DPW | | A | | | | | |
| 254 | YTFTS | 2112 | GWISP | 2206 | CARGE | 2300 | RASQS | 2394 | DTSTR | 2488 | CQQYG | 2582 |
| | HYMH | | YNGNT | | SNSGW | | VSSSSL | | AT | | TSPITF | |
| | | | NYA | | INFDY | | A | | | | | |
| | | | | | W | | | | | | | |
| 255 | YTLTE | 2113 | GGIIPIS | 2207 | CANKG | 2301 | QASHD | 2395 | ATSSL | 2489 | CQQSY | 2583 |
| | LSMH | | GTVTY | | QQLVR | | IRNSV | | QS | | NTPFTF | |
| | | | A | | GYFQH | | N | | | | | |
| | | | | | W | | | | | | | |
| 256 | YTFAT | 2114 | GMINP | 2208 | CARSS | 2302 | RASHD | 2396 | DASNL | 2490 | CQQAD | 2584 |
| | YYLH | | SGGSTI | | GYDFF | | INNYL | | ET | | SFPLTF | |
| | | | YA | | DYW | | N | | | | | |
| 257 | YTFTN | 2115 | GIINPS | 2209 | CARAH | 2303 | RASQSI | 2397 | AASTL | 2491 | CQQSY | 2585 |
| | YFMH | | GGSTS | | TVYYY | | SSWLA | | QS | | STPWT | |
| | | | YA | | GMDV | | | | | | F | |
| | | | | | W | | | | | | | |
| 258 | GTFGS | 2116 | GWINP | 2210 | CARVG | 2304 | RASQSI | 2398 | SASNL | 2492 | CQQYN | 2586 |
| | YAIS | | NTGGA | | AAAGY | | KGALA | | QS | | SYPLTF | |
| | | | HYA | | QHW | | | | | | | |
| 259 | YTFTSS | 2117 | GGIHP | 2211 | CARAR | 2305 | KSSQS | 2399 | WASTR | 2493 | CQQYY | 2587 |
| | EIN | | MFGTT | | LMVY | | LFYSS | | ES | | SIPYTF | |
| | | | NYA | | APSDY | | NNRNY | | | | | |
| | | | | | W | | LA | | | | | |
| 260 | YTFTN | 2118 | GMINP | 2212 | CARVS | 2306 | RSSQSI | 2400 | GASNL | 2494 | CQQVI | 2588 |
| | YYVH | | SGGST | | GWKR | | STYLN | | QS | | SYPITF | |
| | | | NYA | | GWFDP | | | | | | | |
| | | | | | W | | | | | | | |
| 261 | YTFTR | 2119 | GIINPS | 2213 | CARDL | 2307 | KSSQSI | 2401 | WASTR | 2495 | CQQYY | 2589 |
| | YYMH | | GGSAS | | GGAAA | | SHSPN | | ES | | SSPFTF | |
| | | | YA | | GYFDY | | TRDYL | | | | | |
| | | | | | W | | A | | | | | |
| 262 | FTFSD | 2120 | GWMD | 2214 | CAKDI | 2308 | RASQR | 2402 | DVSAR | 2496 | CQQYL | 2590 |
| | YGYY | | PSSGH | | GWGA | | VGNTY | | AS | | SPPLTF | |
| | MH | | TGYA | | FDIW | | LA | | | | | |
| 263 | GTFSS | 2121 | GGIIPI | 2215 | CAKDI | 2309 | RASQS | 2403 | DVSTR | 2497 | CQQYG | 2591 |
| | YAIS | | VGVAN | | GGYPS | | VSSSY | | AT | | SSPITF | |
| | | | YA | | DAFDI | | LA | | | | | |
| | | | | | W | | | | | | | |
| 264 | YTLTE | 2122 | GGIIPIS | 2216 | CARGA | 2310 | RASQD | 2404 | AASSL | 2498 | CQQYY | 2592 |
| | LSMH | | SATSIP | | LYSSSP | | ISNYLA | | QS | | SYPLTF | |
| | | | | | VRVVA | | | | | | | |
| | | | | | GTKG | | | | | | | |
| | | | | | WFDP | | | | | | | |
| | | | | | W | | | | | | | |
| 265 | HTFTS | 2123 | GRIIPIF | 2217 | CARDD | 2311 | RASQS | 2405 | DTSSR | 2499 | CQQYG | 2593 |
| | DYMH | | GTADY | | SSGIFD | | VNSEH | | AT | | SSPVTF | |
| | | | A | | YW | | LA | | | | | |
| 266 | YSLTE | 2124 | GGINPI | 2218 | CARGT | 2312 | RASQS | 2406 | GASTR | 2500 | CQQSF | 2594 |
| | LSIH | | SGTAN | | VRLN | | VGSQL | | AT | | STPLTF | |
| | | | YA | | WFDP | | G | | | | | |
| | | | | | W | | | | | | | |
| 267 | YTLTSF | 2125 | GMIIPL | 2219 | CANLY | 2313 | RASQD | 2407 | AASSL | 2501 | CQQSF | 2595 |
| | GIS | | SGTTH | | GGNAY | | ISNFVA | | QS | | DTPYT | |
| | | | YA | | YYYG | | | | | | F | |
| | | | | | MDVW | | | | | | | |
| 268 | GTFST | 2126 | GGVIP | 2220 | CASMII | 2314 | RASQS | 2408 | DTSSR | 2502 | CQQYD | 2596 |
| | YALS | | VFGTT | | FGAGG | | VNNNQ | | AT | | TSPYTF | |
| | | | DYA | | WDAY | | LA | | | | | |
| | | | | | YFQEW | | | | | | | |
| 269 | GSFSS | 2127 | GLINPS | 2221 | CARDE | 2315 | RASQSI | 2409 | DVSAR | 2503 | CQQYY | 2597 |
| | YALH | | GGRTS | | GYATF | | SSSYL | | AT | | STPLTF | |
| | | | YA | | DYW | | A | | | | | |
| 270 | GTFSS | 2128 | GWISA | 2222 | CAKD | 2316 | RASQSI | 2410 | DASNL | 2504 | CQQTY | 2598 |
| | YYMH | | YNGNT | | MGYY | | SSYLN | | ET | | TTPLTF | |
| | | | NYA | | YDSSG | | | | | | | |
| | | | | | GFDY | | | | | | | |
| | | | | | W | | | | | | | |
| 271 | GTFSS | 2129 | GGIIPIF | 2223 | CARDL | 2317 | RASQS | 2411 | DISSRA | 2505 | CQQYG | 2599 |
| | YAIS | | GTANY | | SIGYY | | VSYNQ | | A | | GLPAT | |
| | | | A | | GDAFD | | LA | | | | F | |
| | | | | | IW | | | | | | | |
| 272 | YIFTNY | 2130 | GGIIPIF | 2224 | CARGR | 2318 | QASQY | 2412 | DASSL | 2506 | CQQSY | 2600 |
| | YIQ | | GTVGY | | IGGGN | | ISNYLN | | ES | | STPYTF | |
| | | | A | | DYW | | | | | | | |
| 273 | DTFNS | 2131 | GGIIPS | 2225 | CASVS | 2319 | RASQS | 2413 | DASTR | 2507 | CQQYN | 2601 |
| | YAVN | | FGTPT | | YGSFD | | VSSSSL | | AS | | RLPYT | |
| | | | YA | | YW | | A | | | | F | |
| 274 | YTFTY | 2132 | GRITPI | 2226 | CAKDS | 2320 | KSSQS | 2414 | WASTR | 2508 | CQQYY | 2602 |
| | RYLH | | SGTTN | | GQLAH | | VLYSS | | ES | | KTPLTF | |
| | | | YA | | YGMD | | NNKNY | | | | | |
| | | | | | VW | | LA | | | | | |
| 275 | YTFTS | 2133 | GWMN | 2227 | CARVG | 2321 | RASQSI | 2415 | AASSL | 2509 | CQQSY | 2603 |
| | YYMH | | PYSGN | | SGWYS | | SSYLN | | QS | | STPLTF | |
| | | | TGYA | | DYW | | | | | | | |
| 276 | YTFTR | 2134 | GWLNP | 2228 | CASSSS | 2322 | RASQS | 2416 | DTSTR | 2510 | CQQYH | 2604 |
| | FNIH | | FTGNT | | WYGW | | VSSYL | | AT | | SSPWT | |
| | | | GYA | | FDPW | | A | | | | F | |
| 277 | YTFTG | 2135 | GWIDP | 2229 | CARDV | 2323 | RASQS | 2417 | DISSRA | 2511 | CQQYG | 2605 |
| | | | NSGGT | | DTAM | | VDNLV | | T | | RSPITF | |
| | YYMH | | NYA | | VTDY | | G | | | | | |
| | | | | | W | | | | | | | |
| 278 | YTFTS | 2136 | GIINPS | 2230 | CARSV | 2324 | KSSQS | 2418 | WASTR | 2512 | CQQYY | 2606 |
| | YYMH | | SGSTT | | GATSA | | VLYSS | | ES | | SLPVTF | |
| | | | YA | | FDIW | | NNENY | | | | | |
| | | | | | | | LA | | | | | |
| 279 | YTFTK | 2137 | GIINPS | 2231 | CARGR | 2325 | RASQSI | 2419 | KASSL | 2513 | CQQYY | 2607 |
| | YYMH | | GGSTS | | GYSYG | | SSSLN | | ES | | SYPPTF | |
| | | | YA | | YLDY | | | | | | | |
| | | | | | W | | | | | | | |
| 280 | YTFTR | 2138 | GIINPS | 2232 | CARGE | 2326 | QASQD | 2420 | QASNK | 2514 | CQQSY | 2608 |
| | YYMH | | GGSTS | | TRSYA | | ISNYLN | | DT | | STPPTF | |
| | | | YA | | PYGMD | | | | | | | |
| | | | | | VW | | | | | | | |
| 281 | YTFNS | 2139 | GIINPT | 2233 | CAKDP | 2327 | RASQS | 2421 | DASAR | 2515 | CQQYY | 2609 |
| | YGIS | | GGSTT | | FVMDV | | VSSSY | | AA | | STPYTF | |
| | | | YA | | W | | LA | | | | | |
| 282 | GTFSS | 2140 | GWMN | 2234 | CARDF | 2328 | RASRSI | 2422 | DASSR | 2516 | CQQYY | 2610 |
| | YAIS | | PNSGD | | EGGG | | SDYLA | | AT | | TTPLTF | |
| | | | TGYA | | WFDP | | | | | | | |
| | | | | | W | | | | | | | |
| 283 | YTFTS | 2141 | GRINPS | 2235 | CARTP | 2329 | RASQSI | 2423 | AASSL | 2517 | CQQSY | 2611 |
| | YYMD | | SGSTT | | SGSYS | | SSYLN | | QS | | STPWT | |
| | | | YV | | DFDY | | | | | | F | |
| | | | | | W | | | | | | | |
| 284 | YTFTS | 2142 | GVINPS | 2236 | CARVP | 2330 | RASHN | 2424 | AASSL | 2518 | CQQSY | 2612 |
| | YYMH | | GGSTT | | GVSPG | | ISTWL | | QS | | STPPTF | |
| | | | YA | | DYGM | | A | | | | | |
| | | | | | DVW | | | | | | | |
| 285 | YSFTN | 2143 | GGIIPV | 2237 | CARES | 2331 | KSSQS | 2425 | WASTR | 2519 | CQQYY | 2613 |
| | YYMH | | FGTTT | | QDGDF | | VLYSS | | ES | | SSPLTF | |
| | | | YS | | DYW | | NNKNY | | | | | |
| | | | | | | | LA | | | | | |
| 286 | YTFTS | 2144 | GWISP | 2238 | CVSDD | 2332 | RASQS | 2426 | DVSTR | 2520 | CQQYN | 2614 |
| | YGIS | | NSGVT | | YGAFD | | VSSSY | | AS | | NWPYT | |
| | | | NYA | | YW | | LA | | | | F | |
| 287 | YTFTR | 2145 | GIINPS | 2239 | CARDR | 2333 | RASQSI | 2427 | AASSL | 2521 | CQQSY | 2615 |
| | HYVH | | SGSAS | | LRSRF | | SSSLA | | QS | | TIPPTF | |
| | | | YA | | DYW | | | | | | | |
| 288 | YTFTT | 2146 | GWMN | 2240 | CARED | 2334 | RASQG | 2428 | KASTL | 2522 | CQQSY | 2616 |
| | YDIN | | PSSGN | | YYDSS | | ISNNLN | | ES | | STPITF | |
| | | | SGFA | | GYYN | | | | | | | |
| | | | | | W | | | | | | | |
| 289 | YTFTS | 2147 | GWMN | 2241 | CVVER | 2335 | QASQG | 2429 | KASSL | 2523 | CQQGY | 2617 |
| | YGIS | | PISGNT | | RREVG | | ITSYLN | | ES | | STPLTF | |
| | | | DYA | | MDVW | | | | | | | |
| 290 | GTFTS | 2148 | GWISA | 2242 | CARDQ | 2336 | RASQSI | 2430 | DASNL | 2524 | CQQTY | 2618 |
| | YYMH | | YNGKT | | GYYYD | | SSYLN | | ET | | SAPPTF | |
| | | | DYA | | SSGAF | | | | | | | |
| | | | | | DIW | | | | | | | |
| 291 | YTFTS | 2149 | GIINPS | 2243 | CARGI | 2337 | RSSQS | 2431 | LGSNR | 2525 | CMQGL | 2619 |
| | YYMH | | GGSTV | | GSKGA | | LLHSN | | AS | | QTPYT | |
| | | | YA | | FDIW | | GYNYL | | | | F | |
| | | | | | | | D | | | | | |
| 292 | YTFTS | 2150 | GWINP | 2244 | CARQG | 2338 | RASQSI | 2432 | DTSSL | 2526 | CQQSFI | 2620 |
| | YGIS | | NSGGT | | GLRDF | | STYVN | | QS | | TPPTF | |
| | | | NYA | | DYW | | | | | | | |
| 293 | YMFTT | 2151 | GVINPI | 2245 | CANDR | 2339 | RSSQS | 2433 | LGSNR | 2527 | CMQAL | 2621 |
| | PYIH | | SGTTT | | HYDF | | LLHSN | | AS | | QTPTF | |
| | | | YA | | WSGY | | GYNYL | | | | | |
| | | | | | YKEEW | | D | | | | | |
| | | | | | EYFQH | | | | | | | |
| | | | | | W | | | | | | | |
| 294 | YTFTS | 2152 | GWINL | 2246 | CAKAI | 2340 | RASQG | 2434 | QASSL | 2528 | CQQAY | 2622 |
| | NNMH | | NSGGT | | DYYY | | IRNDL | | EN | | SLPWT | |
| | | | NYA | | MDVW | | G | | | | F | |

TABLE 18b
Sequences of Non-Selective Anti-FLT3 Polypeptides (VH and VL
Sequences)

| Polypeptide | | SEQ ID | | SEQ ID |
|---|---|---|---|---|
| No. | Full VH | NO | Full VL | NO |
| 201 | QVQLVQSGAEVKKPGASVKV | 2623 | DIQMTQSPSSLSASVGDRVTI | 2717 |
| | SCKASGGTFSSDGISWVRQAP | | TCRASHNIGNKLAWYQQKPG | |
| | GQGLEWMGWISAYHGHTNY | | KAPKLLIYGATTLQSGVPSRF | |
| | AQKFQGRVTMTRDTSTSTVY | | SGSGSGTDFTLTISSLQPEDFA | |
| | MELSSLRSEDTAVYYCARGG | | TYYCQQANSFPRTFGPGTKV | |
| | KHSGSHRSYYYGMDVWGQG | | DIKR | |
| | TTVTVSS | | | |
| 202 | QVQLVQSGAEVKKPGASVKV | 2624 | DIQMTQSPSSLSASVGDRVTI | 2718 |
| | SCKASGYTFTNYYMHWVRQA | | TCRASQSIRSWLAWYQQKPG | |
| | PGQGLEWMGVINPSGGSTNY | | KAPKLLIYDASNLETGVPSRF | |
| | AQKFQGRVTMTRDTSTSTVY | | SGSGSGTDFTLTISSLQPEDFA | |
| | MELSSLRSEDTAVYYCARAG | | TYYCQQIYSLPRTFGQGTKVE | |
| | VGAFHIWGQGTMVTVSS | | IKR | |
| 203 | QVQLVQSGAEVKKPGSSVKV | 2625 | DIVMTQSPDSLAVSLGERATI | 2719 |
| | SCKASGYTLTELSMHWVRQA | | NCKSSQSVLYSSNNKNYLAW | |
| | PGQGLEWMGRIIPISGTANYA | | YQQKPGQPPKLLIYWASTRA | |
| | QKFQGRVTITADESTSTAYME | | SGVPDRFSGSGSGTDFTLTISS | |
| | LSSLRSEDTAVYYCARAARYC | | LQAEDVAVYYCQQYYSTPQT | |
| | SSTSCYWRDGMDVWGQGTT | | FGQGTKLEIKR | |
| | VTVSS | | | |
| 204 | EVQLLESGGGLVQPGGSLRLS | 2626 | DIQMTQSPSSLSASVGDRVTI | 2720 |
| | CAASGFDFSTYNMFWVRQAP | | TCRASQSIGSNLDWYQQKPG | |
| | GKGLEWVSGISGSGRSKYYA | | KAPKLLIYDASSLQSGVPSRF | |
| | DSVKGRFTISRDNSKNTLYLQ | | SGSGSGTDFTLTISSLQPEDFA | |
| | MNSLRAEDTAVYYCARVYYD | | TYYCQQSYSTPYTFGQGTKL | |
| | SSGYYPYYFDYWGQGTLVTV | | EIKR | |
| | SS | | | |
| 205 | QVQLVQSGAEVKKPGSSVKV | 2627 | DIVMTQSPLSLPVTPGEPASIS | 2721 |
| | SCKASGGSFISHTFSWVRQAP | | CRSSQSLLHSNGYNYLDWYL | |
| | GQGLEWMGGIIPISGTANYAQ | | QKPGQSPQLLIYAASSLQSGV | |
| | KFQGRVTITADESTSTAYMEL | | PDRFSGSGSGTDFTLKISRVE | |
| | SSLRSEDTAVYYCAKGRGQL | | AEDVGVYYCMQALQTPLTFG | |
| | VGGYFQHWGQGTLVTVSS | | QGTRLEIKR | |
| 206 | QVQLVQSGAEVKKPGSSVKV | 2628 | DIQMTQSPSSLSASVGDRVTI | 2722 |
| | SCKASGYTFTSYYLHWVRQA | | TCRASQAISSYLAWYQQKPG | |
| | PGQGLEWMGGIIPIFGKAEYS | | KAPKLLIYAASNLQGGVPSRF | |
| | QRFQGRVTITADESTSTAYME | | SGSGSGTDFTLTISSLQPEDFA | |
| | LSSLRSEDTAVYYCAREDFWS | | TYYCQQSYSTPLTFGGGTKV | |
| | GPYGMDVWGQGTTVTVSS | | EIKR | |
| 207 | QVQLVQSGAEVKKPGASVKV | 2629 | DIQMTQSPSSLSASVGDRVTI | 2723 |
| | SCKASGYTFTNYYMHWVRQA | | TCQASHDISKYLNWYQQKPG | |
| | PGQGLEWMGWMNPNSGNTG | | KAPKLLIYAASILQSGVPSRFS | |
| | YAQRFQGRVTMTRDTSTSTV | | GSGSGTDFTLTISSLQPEDFAT | |
| | YMELSSLRSEDTAVYYCAKSH | | YYCQQSYSTPYTFGQGTKLEI | |
| | YYYFYGMDVWGQGTTVTVSS | | KR | |
| 208 | QVQLVQSGAEVKKPGASVKV | 2630 | EIVMTQSPATLSVSPGERATL | 2724 |
| | SCKASGGTFSSRSISWVRQAP | | SCRASQSLSNIYLAWYQQKP | |
| | GQGLEWMGIINPSGGGTLYAQ | | GQAPRLLIYDVSSRAAGIPAR | |
| | KFQGRVTMTRDTSTSTVYME | | FSGSGSGTEFTLTISSLQSEDF | |
| | LSSLRSEDTAVYYCAKDMDG | | AVYYCQQYATSPLTFGGGTK | |
| | WSDAFDIWGQGTTVTVSS | | VEIKR | |
| 209 | EVQLLESGGGLVQPGGSLRLS | 2631 | DIQMTQSPSSLSASVGDRVTI | 2725 |
| | CAASGFAFSSYVLHWVRQAP | | TCRASQSISTWLAWYQQKPG | |
| | GKGLEWVAGIWVDGHNKDY | | KAPKLLIYDASKLETGVPSRF | |
| | ADSVKGRFTISRDNSKNTLYL | | SGSGSGTDFTLTISSLQPEDFA | |
| | QMNSLRAEDTAVYYCAREFG | | TYYCQQSYTTPYTFGQGTKV | |
| | AAGSFQHWGQGTLVTVSS | | EIKR | |
| 210 | QVQLVQSGAEVKKPGSSVKV | 2632 | DIVMTQSPDSLAVSLGERATI | 2726 |
| | SCKASGYTLTELSMHWVRQA | | NCKSSQSVFYSSNNKNYLAW | |
| | PGQGLEWMGGIIPISGTTKYA | | YQQKPGQPPKLLIYWASTRA | |
| | QKFQGRVTITADESTSTAYME | | SGVPDRFSGSGSGTDFTLTISS | |
| | LSSLRSEDTAVYYCARASPRY | | LQAEDVAVYYCHQYYSKPPT | |
| | YMDVWGKGTTVTVSS | | FGQGTKVEIKR | |
| 211 | EVQLLESGGGLVQPGGSLRLS | 2633 | DIQMTQSPSSLSASVGDRVTI | 2727 |
| | CAASGFTFSNHYMSWVRQAP | | TCRASQGISNNLAWYQQKPG | |
| | GKGLEWVSAIGAGGGTYYAD | | KAPKLLIYAASTLHNGVPSRF | |
| | SVKGRFTISRDNSKNTLYLQM | | SGSGSGTDFTLTISSLQPEDFA | |
| | NSLRAEDTAVYYCAKSSGYS | | TYYCQQYGRSPKTFGQGTKV | |
| | YGRRPFDYWGQGTLVTVSS | | EIKR | |
| 212 | QVQLVQSGAEVKKPGSSVKV | 2634 | EIVMTQSPATLSVSPGERATL | 2728 |
| | SCKASGYTFTGYYMHWVRQA | | SCRASQSVSSSQLAWYQQKP | |
| | PGQGLEWMGGIIPILGTANNA | | GQAPRLLIYDTSTRATGIPAR | |
| | QKFQGRVTITADESTSTAYME | | FSGSGSGTEFTLTISSLQSEDF | |
| | LSSLRSEDTAVYYCARAPWGT | | AVYYCQQYDNSLWTFGQGT | |
| | FDYWGQGTLVTVSS | | RLEIKR | |
| 213 | QVQLVQSGAEVKKPGASVKV | 2635 | DIQMTQSPSSLSASVGDRVTI | 2729 |
| | SCKASGYTFSRYYMSWVRQA | | TCRASQSISSYLNWYQQKPG | |
| | PGQGLEWMGWMNPNSGNTG | | KAPKLLIYDASNLKTGVPSRF | |
| | YAQKFQGRVTMTRDTSTSTV | | SGSGSGTDFTLTISSLQPEDFA | |
| | YMELSSLRSEDTAVYYCARTR | | TYYCQQSYSTPLTFGPGTKV | |
| | FAAQPHNWHFDLWGRGTLVT | | DIKR | |
| | VSS | | | |
| 214 | QVQLVQSGAEVKKPGASVKV | 2636 | DIQMTQSPSSLSASVGDRVTI | 2730 |
| | SCKASGYTFTTYYMHWVRQA | | TCRASQGIRNHLAWYQQKPG | |
| | PGQGLEWMGIINPSGGSTSYA | | KAPKLLIYAASSLQSGVPSRF | |
| | QKFQGRVTMTRDTSTSTVYM | | SGSGSGTDFTLTISSLQPEDFA | |
| | ELSSLRSEDTAVYYCARDRAA | | TYYCQQSYSTPTFGQGTKVEI | |
| | RPRGGFDYWGQGTLVTVSS | | KR | |
| 215 | QVQLVQSGAEVKKPGASVKV | 2637 | DIQMTQSPSSLSASVGDRVTI | 2731 |
| | SCKASGYTFTGYRMHWVRQA | | TCRASQGISSYLAWYQQKPG | |
| | PGQGLEWMGWINPNSGGTNY | | KAPKLLIYAASTLQSGVPSRF | |
| | AQKFQGRVTMTRDTSTSTVY | | SGSGSGTDFTLTISSLQPEDFA | |
| | MELSSLRSEDTAVYYCAKGG | | TYYCQQSYSTPLTFGGGTKV | |
| | LDWRNWYFDLWGRGTLVTV | | EIKR | |
| | SS | | | |
| 216 | QVQLVQSGAEVKKPGSSVKV | 2638 | DIVMTQSPLSLPVTPGEPASIS | 2732 |
| | SCKASGNTFTMYYMHWVRQ | | CRSSQSLLHSNGYNYLDWYL | |
| | APGQGLEWVGAIIPISGTVIYA | | QKPGQSPQLLIYLGSNRASGV | |
| | RKFQGRVTITADESTSTAYME | | PDRFSGSGSGTDFTLKISRVE | |
| | LSSLRSEDTAVYYCARLSGGR | | AEDVGVYYCMQALQTPLTFG | |
| | MYDAFDIWGQGTTVTVSS | | QGTKVEIKR | |
| 217 | QVQLVQSGAEVKKPGSSVKV | 2639 | DIVMTQSPDSLAVSLGERATI | 2733 |
| | SCKASGYTFTTFYLHWVRQAP | | NCKSSQSVLYSVNNKNYLA | |
| | GQGLEWIGGIIPMSGTANYAQ | | WYQQKPGQPPKLLIYWASTR | |
| | KFQGRVTITADESTSTAYMEL | | ESGVPDRFSGSGSGTDFTLTIS | |
| | SSLRSEDTAVYYCASGGENG | | SLQAEDVAVYYCQQYYSAPP | |
| | MDVWGQGTTVTVSS | | TFGQGTKVEIKR | |
| 218 | QVQLVQSGAEVKKPGASVKV | 2640 | DIQMTQSPSSLSASVGDRVTI | 2734 |
| | SCKASGYSFTTHYMHWVRQA | | TCRASQSISTWLAWYQQKPG | |
| | PGQGLEWMGIINPSGGSTRYA | | KAPKLLIYAASSLQSGVPSRF | |
| | QKFQGRVTMTRDTSTSTVYM | | SGSGSGTDFTLTISSLQPEDFA | |
| | ELSSLRSEDTAVYYCARGSSY | | TYYCQQAISFPLTFGGGTKVE | |
| | YYYGVDVWGKGTTVTVSS | | IKR | |
| 219 | QVQLVQSGAEVKKPGASVKV | 2641 | DIQMTQSPSSLSASVGDRVTI | 2735 |
| | SCKASGYTFTNYYMHWVRQA | | TCRASQGIRSELSWYQQKPG | |
| | PGQGLEWMGIINPSSGSASYT | | KAPKLLIYKASSLESGVPSRFS | |
| | QKLQGRVTMTRDTSTSTVYM | | GSGSGTDFTLTISSLQPEDFAT | |
| | ELSSLRSEDTAVYYCARDRST | | YYCLQHNSYPLTFGGGTKVEI | |
| | LVPLDYWGQGTLVTVSS | | KR | |
| 220 | QVQLVQSGAEVKKPGASVKV | 2642 | DIQMTQSPSSLSASVGDRVTI | 2736 |
| | SCKASGYTFTGYYMYWVRQA | | TCRASQGIRNDLGWYQQKPG | |
| | PGQGLEWMGIINPRGGITSYA | | KAPKLLIYAASSLQSGVPSRF | |
| | QRFQGRVTMTRDTSTSTVYM | | SGSGSGTDFTLTISSLQPEDFA | |
| | ELSSLRSEDTAVYYCARGSTS | | TYYCQQANRFPPTFGQGTKV | |
| | SGWPNGDMDVWGKGTTVTV | | EIKR | |
| | SS | | | |
| 221 | QVQLVQSGAEVKKPGASVKV | 2643 | DIVMTQSPLSLPVTPGEPASIS | 2737 |
| | SCKASGYTFTDNYMHWVRQA | | CRSSQSLLHSNGYNYLDWYL | |
| | PGQGLEWMGWMTPDSNNTG | | QKPGQSPQLLIYGASYLQSGV | |
| | FAQNFQGRVTMTRDTSTSTVY | | PDRFSGSGSGTDFTLKISRVE | |
| | MELSSLRSEDTAVYYCALGD | | AEDVGVYYCMQALQGPITFG | |
| | GPFGMDVWGQGTTVTVSS | | QGTKVEIKR | |
| 222 | QVQLVQSGAEVKKPGASVKV | 2644 | DIQMTQSPSSLSASVGDRVTI | 2738 |
| | SCKASGYSFTAYYMHWVRQA | | TCRASQDISNYLAWYQQKPG | |
| | PGQGLEWMGIINPSGGSTSYA | | KAPKLLIYAASTLQSGVPSRF | |
| | QKFQGRVTMTRDTSTSTVYM | | SGSGSGTDFTLTISSLQPEDFA | |
| | ELSSLRSEDTAVYYCARVAGI | | TYYCQQSYRTPYTFGQGTKV | |
| | NGEMAYWGQGTLVTVSS | | EIKR | |
| 223 | QVQLVQSGAEVKKPGASVKV | 2645 | DIQMTQSPSSLSASVGDRVTI | 2739 |
| | SCKASGYTFTNSFIHWVRQAP | | TCRASQGISNYLAWYQQKPG | |
| | GQGLEWMGIINPSGGSTSYAQ | | KAPKLLIYDGSNLETGVPSRF | |
| | KFQGRVTMTRDTSTSTVYME | | SGSGSGTDFTLTISSLQPEDFA | |
| | LSSLRSEDTAVYYCAKALERR | | TYYCQQSYSTPLTFGQGTKV | |
| | YYYGMDVWGQGTTVTVSS | | EIKR | |
| 224 | QVQLVQSGAEVKKPGSSVKV | 2646 | EIVMTQSPATLSVSPGERATL | 2740 |
| | SCKASGYTFTGYYMHWVRQA | | SCRASQSVSSDFLAWYQQKP | |
| | PGQGLEWMGVINPIYGTANY | | GQAPRLLIYDTSSRASGIPARF | |
| | ALKFQGRVTITADESTSTAYM | | SGSGSGTEFTLTISSLQSEDFA | |
| | ELSSLRSEDTAVYYCAKAISSG | | VYYCQQYAGPPTFGQGTRLE | |
| | WSNDAFDIWGQGTMVTVSS | | IKR | |
| 225 | QVQLVQSGAEVKKPGSSVKV | 2647 | DIVMTQSPDSLAVSLGERATI | 2741 |
| | SCKASGYTLTELSIHWVRQAP | | NCKSSQSLLYGSKNYISWYQ | |
| | GQGLEWMGGIVPMSGTASYA | | QKPGQPPKLLIYSSSTRESGVP | |
| | QKFQGRVTITADESTSTAYME | | DRFSGSGSGTDFTLTISSLQAE | |
| | LSSLRSEDTAVYYCARRRDGY | | DVAVYYCQQYYTTPYTFGQ | |
| | NSWGQGTLVTVSS | | GTKVEIKR | |
| 226 | QVQLVQSGAEVKKPGASVKV | 2648 | DIQMTQSPSSLSASVGDRVTI | 2742 |
| | SCKASGYTFTGYYMHWVRQA | | TCRASQGISNYLAWYQQKPG | |
| | PGQGLEWMGIIDPSGGSTSYA | | KAPKLLIYGASNLQSGVPSRF | |
| | QKFQGRVTMTRDTSTSTVYM | | SGSGSGTDFTLTISSLQPEDFA | |
| | ELSSLRSEDTAVYYCARDRSL | | TYYCQQSYGTPYTFGQGTKL | |
| | LWSGVGGMDVWGQGTTVTV | | EIKR | |
| | SS | | | |
| 227 | QVQLVQSGAEVKKPGSSVKV | 2649 | DIQMTQSPSSLSASVGDRVTI | 2743 |
| | SCKASGYTLNELFMHWVRQA | | TCRASQSVSSYLNWYQQKPG | |
| | PGQGLEWVGGIIPMSGTTFYA | | KAPKLLIYGASNLQSGVPSRF | |
| | QTFQGRVTITADESTSTAYME | | SGSGSGTDFTLTISSLQPEDFA | |
| | LSSLRSEDTAVYYCAKGVRQ | | TYYCQQSYTTPWTFGQGTRL | |
| | YSYGRYYYGMDVWGQGTLV | | EIKR | |
| | TVSS | | | |
| 228 | QVQLVQSGAEVKKPGASVKV | 2650 | DIQMTQSPSSLSASVGDRVTI | 2744 |
| | SCKASGGTFSSHAISWVRQAP | | TCRASQSIYTHLNWYQQKPG | |
| | GQGLEWMGWINPGSGGTNYA | | KAPKLLIYAASRLQTGVPSRF | |
| | QKFQGRVTMTRDTSTSTVYM | | SGSGSGTDFTLTISSLQPEDFA | |
| | ELSSLRSEDTAVYYCAKDSYD | | TYYCQQSYSFPFTFGPGTKVD | |
| | FWSGYYIDYWGQGTLVTVSS | | IKR | |
| 229 | QVQLVQSGAEVKKPGASVKV | 2651 | DIQMTQSPSSLSASVGDRVTI | 2745 |
| | SCKASGYTFTNYYMHWVRQA | | TCRASQGISNSLAWYQQKPG | |
| | PGQGLEWMGIINPSGGSTSYA | | KAPKLLIYAASSLQSGVPSRF | |
| | QKFQGRVTMTRDTSTSTVYM | | SGSGSGTDFTLTISSLQPEDFA | |
| | ELSSLRSEDTAVYYCARGVGY | | TYYCQQSHSPPYTFGQGTKL | |
| | SGYGADLWGRGTLVTVSS | | EIKR | |
| 230 | QVQLVQSGAEVKKPGSSVKV | 2652 | EIVMTQSPATLSVSPGERATL | 2746 |
| | SCKASGGTFSSNAINWVRQAP | | SCRASQSVSADYIAWYQQKP | |
| | GQGLEWMGGIIPLFGTTNYAQ | | GQAPRLLIYDVSTRASGIPAR | |
| | KFQGRVTITADESTSTAYMEL | | FSGSGSGTEFTLTISSLQSEDF | |
| | SSLRSEDTAVYYCARVLSGW | | AVYYCQHYGSSQVTFGQGTK | |
| | YGTYYFDYWGQGTLVTVSS | | VEIKR | |
| 231 | QVQLVQSGAEVKKPGASVKV | 2653 | DIQMTQSPSSLSASVGDRVTI | 2747 |
| | SCKASGYTFTSYYIHWVRQAP | | TCRASQSISTYLNWYQQKPG | |
| | GQGLEWMGLINPSGGSTTYA | | KAPKLLIYAASNLQSGVPSRF | |
| | QSFQGRVTMTRDTSTSTVYM | | SGSGSGTDFTLTISSLQPEDFA | |
| | ELSSLRSEDTAVYYCARGLG | | TYYCQQSYSSPLTFGPGTKVD | |
| | WGVVVPAAELDYWGQGTLV | | IKR | |
| | TVSS | | | |
| 232 | QVQLVQSGAEVKKPGASVKV | 2654 | DIQMTQSPSSLSASVGDRVTI | 2748 |
| | SCKASGYTFTSYGIHWVRQAP | | TCRASQNIANSLNWYQQKPG | |
| | GQGLEWMGGIIPIFGTASYAQ | | KAPKLLIYAASSLQSGVPSRF | |
| | KFQGRVTMTRDTSTSTVYME | | SGSGSGTDFTLTISSLQPEDFA | |
| | LSSLRSEDTAVYYCTRSNGIA | | TYYCQQYSSYPPTFGPGTKV | |
| | AAGTHWYFDLWGRGTLVTVS | | DIKR | |
| | S | | | |
| 233 | QVQLVQSGAEVKKPGASVKV | 2655 | DIVMTQSPLSLPVTPGEPASIS | 2749 |
| | SCKASGYTFTSYYLHWVRQA | | CRSSQSLLHSNGYNYLDWYL | |
| | PGQGLEWIGVINPSGGSTTYA | | QKPGQSPQLLIYAASSLQSGV | |
| | QRFQGRVTMTRDTSTSTVYM | | PDRFSGSGSGTDFTLKISRVE | |
| | ELSSLRSEDTAVYYCARGIGY | | AEDVGVYYCMQGLRTPHTF | |
| | GGYFDYWGQGTLVTVSS | | GGGTKVEIKR | |
| 234 | QVQLVQSGAEVKKPGSSVKV | 2656 | DIVMTQSPDSLAVSLGERATI | 2750 |
| | SCKASGHTFTAYYMHWVRQA | | NCKSSQSVLYSSNNKNYLAW | |
| | PGQGLEWMGWMSPYSGNTG | | YQQKPGQPPKLLIYWASIRES | |
| | YAQNFQGRVTITADESTSTAY | | GVPDRFSGSGSGTDFTLTISSL | |
| | MELSSLRSEDTAVYYCARATR | | QAEDVAVYYCQQYYTTPITF | |
| | GTIQHWGQGTLVTVSS | | GQGTRLEIKR | |
| 235 | QVQLVQSGAEVKKPGASVKV | 2657 | EIVMTQSPATLSVSPGERATL | 2751 |
| | SCKASGYTFTGYYMHWVRQA | | SCRASQSVSSNLAWYQQKPG | |
| | PGQGLEWMGIINPSGGSTSYA | | QAPRLLIYGASTRATGIPARFS | |
| | QKFQGRVTMTRDTSTSTVYM | | GSGSGTEFTLTISSLQSEDFAV | |
| | ELSSLRSEDTAVYYCARDPGR | | YYCQQYGSSPLTFGGGTKVEI | |
| | LGELDYWGQGTLVTVSS | | KR | |
| 236 | QVQLVQSGAEVKKPGSSVKV | 2658 | EIVMTQSPATLSVSPGERATL | 2752 |
| | SCKASGGTFSSYAISWVRQAP | | SCRASQSVSSNLAWYQQKPG | |
| | GQGLEWMGGIIPILGIANYAQ | | QAPRLLIYDVSSRATGIPARFS | |
| | KFQGRVTITADESTSTAYMEL | | GSGSGTEFTLTISSLQSEDFAV | |
| | SSLRSEDTAVYYCAHVDGYG | | YYCQQLDAYPLTFGGGTKVE | |
| | MDVWGQGTTVTVSS | | IKR | |
| 237 | QVQLVQSGAEVKKPGASVKV | 2659 | DIVMTQSPLSLPVTPGEPASIS | 2753 |
| | SCKASGYTFTSYYMHWVRQA | | CRSSQSLLHSNGYNYLDWYL | |
| | PGQGLEWMGLINPSSGSTSYA | | QKPGQSPQLLIYAASTLQSGV | |
| | RNFQGRVTMTRDTSTSTVYM | | PDRFSGSGSGTDFTLKISRVE | |
| | ELSSLRSEDTAVYYCARSGSG | | AEDVGVYYCMQALQTPLTFG | |
| | GSYFLFDYWGQGTLVTVSS | | GGTKVEIKR | |
| 238 | QVQLVQSGAEVKKPGASVKV | 2660 | DIVMTQSPLSLPVTPGEPASIS | 2754 |
| | SCKASGYTFTIYYMHWVRQA | | CRSSQSLLHSNGYNYLDWYL | |
| | PGQGLEWMGIINPSGGSTVYA | | QKPGQSPQLLIYLGSNRASGV | |
| | QTFQGRVTMTRDTSTSTVYM | | PDRFSGSGSGTDFTLKISRVE | |
| | ELSSLRSEDTAVYYCARGIGS | | AEDVGVYYCMQGLQTPYTF | |
| | KGAFDIWGQGTMVTVSS | | GQGTRLEIKR | |
| 239 | QVQLVQSGAEVKKPGSSVKV | 2661 | EIVMTQSPATLSVSPGERATL | 2755 |
| | SCKASGGTFSSYAISWVRQAP | | SCRASQSVGSSYLAWYQQKP | |
| | GQGLEWMGGIIPILGTANYAQ | | GQAPRLLIYDVSTRAAGIPAR | |
| | KFQGRVTITADESTSTAYMEL | | FSGSGSGTEFTLTISSLQSEDF | |
| | SSLRSEDTAVYYCARTMTTVT | | AVYYCHQYGSSPYTFGQGTK | |
| | YYDAFDIWGQGTMVTVSS | | VEIKR | |
| 240 | QVQLVQSGAEVKKPGASVKV | 2662 | DIQMTQSPSSLSASVGDRVTI | 2756 |
| | SCKASGYTFTSYYMHWVRQA | | TCRASQSISSYLNWYQQKPG | |
| | PGQGLEWMGIINPSSGSTTYA | | KAPKLLIYAASSLQSGVPSRF | |
| | LKFQGRVTMTRDTSTSTVYM | | SGSGSGTDFTLTISSLQPEDFA | |
| | ELSSLRSEDTAVYYCARGLGK | | TYYCQQSYSTPLTFGQGTRLE | |
| | SAIDYWGQGTLVTVSS | | IKR | |
| 241 | QVQLVQSGAEVKKPGASVKV | 2663 | DIQMTQSPSSLSASVGDRVTI | 2757 |
| | SCKASGYTFTRHYVHWVRQA | | TCRASQSISNYLAWYQQKPG | |
| | PGQGLEWMGIINPSGGSTSYA | | KAPKLLIYAASSLQGGVPSRF | |
| | QKFQGRVTMTRDTSTSTVYM | | SGSGSGTDFTLTISSLQPEDFA | |
| | ELSSLRSEDTAVYYCARSYHH | | TYYCQQSYSTPWTFGQGTKV | |
| | YYYGMDVWGQGTTVTVSS | | EIKR | |
| 242 | QVQLVQSGAEVKKPGSSVKV | 2664 | EIVMTQSPATLSVSPGERATL | 2758 |
| | SCKASGGTFSSATISWVRQAP | | SCRASESVSSALAWYQQKPG | |
| | GQGLEWMGGIIPMFGTANYA | | QAPRLLIYGASTRATGIPARFS | |
| | QKFQGRVTITADESTSTAYME | | GSGSGTEFTLTISSLQSEDFAV | |
| | LSSLRSEDTAVYYCARDAYG | | YYCQQYGNSVTFGGGTKVEI | |
| | DSTWGQGTLVTVSS | | KR | |
| 243 | QVQLVQSGAEVKKPGSSVKV | 2665 | EIVMTQSPATLSVSPGERATL | 2759 |
| | SCKASGGTFSSHAFNWVRQAP | | SCRASQTLTGGLLAWYQQKP | |
| | GQGLEWMGGISPMFGTPNYA | | GQAPRLLIYDTSSRAAGIPAR | |
| | QKFQGRVTITADESTSTAYME | | FSGSGSGTEFTLTISSLQSEDF | |
| | LSSLRSEDTAVYYCARAPDYG | | AVYYCHHYGSSPYTFGQGTK | |
| | DDWYFDLWGRGTLVTVSS | | VEIKR | |
| 244 | QVQLVQSGAEVKKPGASVKV | 2666 | DIQMTQSPSSLSASVGDRVTI | 2760 |
| | SCKASGYTFTSYYMHWVRQA | | TCRASQDIRNDLGWYQQKPG | |
| | PGQGLEWMGRINPSGGSTSYA | | KAPKLLIYAASSLQSGVPSRF | |
| | QSFQGRVTMTRDTSTSTVYM | | SGSGSGTDFTLTISSLQPEDFA | |
| | ELSSLRSEDTAVYYCARVPGL | | TYYCQQSYSSPFTFGQGTKVE | |
| | YGGAIDYWGQGTLVTVSS | | IKR | |
| 245 | QVQLVQSGAEVKKPGSSVKV | 2667 | EIVMTQSPATLSVSPGERATL | 2761 |
| | SCKASGYTFTGFYIHWVRQAP | | SCRASQSVSSSYLAWYQQKP | |
| | GQGLEWMGGVIPFFSRTIYAQ | | GQAPRLLIYGASTRATGIPAR | |
| | KFQGRVTITADESTSTAYMEL | | FSGSGSGTEFTLTISSLQSEDF | |
| | SSLRSEDTAVYYCAYGANGH | | AVYYCQQYSSSPLTFGQGTK | |
| | LYGMDAWGQGTTVTVSS | | VEIKR | |
| 246 | QVQLVQSGAEVKKPGSSVKV | 2668 | DIQMTQSPSSLSASVGDRVTI | 2762 |
| | SCKASGGTFTSYFMHWVRQA | | TCQATQDISNYLNWYQQKPG | |
| | PGQGLEWMGGIIPMFGAPVY | | KAPKLLIYGASNLPSGVPSRF | |
| | AQDFQGRVTITADESTSTAYM | | SGSGSGTDFTLTISSLQPEDFA | |
| | ELSSLRSEDTAVYYCAAGLDF | | TYYCQQSYSDLLTFGPGTKV | |
| | WSGPDNYYMDVWGKGTTVT | | DIKR | |
| | VSS | | | |
| 247 | QVQLVQSGAEVKKPGASVKV | 2669 | EIVMTQSPATLSVSPGERATL | 2763 |
| | SCKASGGTLMSYAISWVRQAP | | SCRGSQSISGNYLAWYQQKP | |
| | GQGLEWMGIINPRGGTTRYA | | GQAPRLLIYDTSARAAGIPAR | |
| | QKFQGRVTMTRDTSTSTVYM | | FSGSGSGTEFTLTISSLQSEDF | |
| | ELSSLRSEDTAVYYCARSEDS | | AVYYCQQYNSYPLTFGGGTK | |
| | GYDYLDYWGQGTLVTVSS | | VEIKR | |
| 248 | QVQLVQSGAEVKKPGASVKV | 2670 | DIQMTQSPSSLSASVGDRVTI | 2764 |
| | SCKASGYTFTGYYMHWVRQA | | TCRASQDLDRYLAWYQQKP | |
| | PGQGLEWMGVINPNGGSISYA | | GKAPKLLIYAASSLQTGVPSR | |
| | QKFQGRVTMTRDTSTSTVYM | | FSGSGSGTDFTLTISSLQPEDF | |
| | ELSSLRSEDTAVYYCAREGWF | | ATYYCQQYYSTPYTFGQGTK | |
| | GEDGMDVWGQGTTVTVSS | | LEIKR | |
| 249 | QVQLVQSGAEVKKPGASVKV | 2671 | EIVMTQSPATLSVSPGERATL | 2765 |
| | SCKASGYTFTSDGISWVRQAP | | SCRASQSIGNNLKAWYQQKP | |
| | GQGLEWMGWMNPNSGNAGY | | GQAPRLLIYDTSAHTTGIPAR | |
| | AQKFQGRVTMTRDTSTSTVY | | FSGSGSGTEFTLTISSLQSEDF | |
| | MELSSLRSEDTAVYYCATAV | | AVYYCQHYGNSLTFGQGTK | |
| | AGTDAFDIWGQGTMVTVSS | | VEIK | |
| 250 | QVQLVQSGAEVKKPGSSVKV | 2672 | EIVMTQSPATLSVSPGERATL | 2766 |
| | SCKASGYTLTSFAMHWVRQA | | SCRASQSVGSSSLAWYQQKP | |
| | PGQGLEWMGRIIPMSGTANY | | GQAPRLLIYGASTRATGIPAR | |
| | AQKFQGRVTITADESTSTAYM | | FSGSGSGTEFTLTISSLQSEDF | |
| | ELSSLRSEDTAVYYCASTSPD | | AVYYCQQYGSSPYTFGQGTK | |
| | QYYYGMDVWGQGTTVTVSS | | VEIKR | |
| 251 | QVQLVQSGAEVKKPGSSVKV | 2673 | EIVMTQSPATLSVSPGERATL | 2767 |
| | SCKASGGTFSSDAINWVRQAP | | SCRASQSVSSNYLAWYQQKP | |
| | GQGLEWMGGIIPIVGTPTYAQ | | GQAPRLLIYDVSTRATGIPAR | |
| | KFQGRVTITADESTSTAYMEL | | FSGSGSGTEFTLTISSLQSEDF | |
| | SSLRSEDTAVYYCAKGLAFGV | | AVYYCQQYGSSTLTFGGGTK | |
| | FDGLDVWGQGTTVTVSS | | VEIKR | |
| 252 | QVQLVQSGAEVKKPGSSVKV | 2674 | DIQMTQSPSSLSASVGDRVTI | 2768 |
| | SCKASGYTLTDLSIHWVRQAP | | TCRASQSISSYLNWYQQKPG | |
| | GQGLEWVGGIIPMSGTANYA | | KAPKLLIYAASSLQSGVPSRF | |
| | QKFQGRVTITADESTSTAYME | | SGSGSGTDFTLTISSLQPEDFA | |
| | LSSLRSEDTAVYYCARSSSSW | | TYYCQQSYSTPLTFGGGTKV | |
| | PKYFQHWGQGTLVTVSS | | EIKR | |
| 253 | QVQLVQSGAEVKKPGSSVKV | 2675 | DIQMTQSPSSLSASVGDRVTI | 2769 |
| | SCKASGYTFTTYFMHWVRQA | | TCRASQDISRWLAWYQQKPG | |
| | PGQGLEWMGGIVPVFGTTKY | | KAPKLLIYAASSLQSGVPSRF | |
| | AQKFQGRVTITADESTSTAYM | | SGSGSGTDFTLTISSLQPEDFA | |
| | ELSSLRSEDTAVYYCASSAVG | | TYYCQQYDNFPLTFGGGTKL | |
| | WFDPWGQGTLVTVSS | | EIKR | |
| 254 | QVQLVQSGAEVKKPGASVKV | 2676 | EIVMTQSPATLSVSPGERATL | 2770 |
| | SCKASGYTFTSHYMHWVRQA | | SCRASQSVSSSSLAWYQQKP | |
| | PGQGLEWMGWISPYNGNTNY | | GQAPRLLIYDTSTRATGIPAR | |
| | AQKLQGRVTMTRDTSTSTVY | | FSGSGSGTEFTLTISSLQSEDF | |
| | MELSSLRSEDTAVYYCARGES | | AVYYCQQYGTSPITFGQGTR | |
| | NSGWINFDYWGQGTLVTVSS | | LEIKR | |
| 255 | QVQLVQSGAEVKKPGSSVKV | 2677 | DIQMTQSPSSLSASVGDRVTI | 2771 |
| | SCKASGYTLTELSMHWVRQA | | TCQASHDIRNSVNWYQQKPG | |
| | PGQGLEWMGGIIPISGTVTYA | | KAPKLLIYATSSLQSGVPSRFS | |
| | QKFQGRVTITADESTSTAYME | | GSGSGTDFTLTISSLQPEDFAT | |
| | LSSLRSEDTAVYYCANKGQQL | | YYCQQSYNTPFTFGQGTKLEI | |
| | VRGYFQHWGQGTLVTVSS | | KR | |
| 256 | QVQLVQSGAEVKKPGASVKV | 2678 | DIQMTQSPSSLSASVGDRVTI | 2772 |
| | SCKASGYTFATYYLHWVRQA | | TCRASHDINNYLNWYQQKPG | |
| | PGQGLEWMGMINPSGGSTIYA | | KAPKLLIYDASNLETGVPSRF | |
| | QKFQGRVTMTRDTSTSTVYM | | SGSGSGTDFTLTISSLQPEDFA | |
| | ELSSLRSEDTAVYYCARSSGY | | TYYCQQADSFPLTFGGGTKV | |
| | DFFDYWGQGTLVTVSS | | EIKR | |
| 257 | QVQLVQSGAEVKKPGASVKV | 2679 | DIQMTQSPSSLSASVGDRVTI | 2773 |
| | SCKASGYTFTNYFMHWVRQA | | TCRASQSISSWLAWYQQKPG | |
| | PGQGLEWMGIINPSGGSTSYA | | KAPKLLIYAASTLQSGVPSRF | |
| | QKFQGRVTMTRDTSTSTVYM | | SGSGSGTDFTLTISSLQPEDFA | |
| | ELSSLRSEDTAVYYCARAHTV | | TYYCQQSYSTPWTFGQGTKL | |
| | YYYGMDVWGQGTMVTVSS | | EIKR | |
| 258 | QVQLVQSGAEVKKPGASVKV | 2680 | DIQMTQSPSSLSASVGDRVTI | 2774 |
| | SCKASGGTFGSYAISWVRQAP | | TCRASQSIKGALAWYQQKPG | |
| | GQGLEWMGWINPNTGGAHY | | KAPKLLIYSASNLQSGVPSRF | |
| | AQKFQGRVTMTRDTSTSTVY | | SGSGSGTDFTLTISSLQPEDFA | |
| | MELSSLRSEDTAVYYCARVG | | TYYCQQYNSYPLTFGGGTKV | |
| | AAAGYQHWGQGTLVTVSS | | EIKR | |
| 259 | QVQLVQSGAEVKKPGSSVKV | 2681 | DIVMTQSPDSLAVSLGERATI | 2775 |
| | SCKASGYTFTSSEINWVRQAP | | NCKSSQSLFYSSNNRNYLAW | |
| | GQGLEWMGGIHPMFGTTNYA | | YQQKPGQPPKLLIYWASTRES | |
| | QKFQGRVTITADESTSTAYME | | GVPDRFSGSGSGTDFTLTISSL | |
| | LSSLRSEDTAVYYCARARLM | | QAEDVAVYYCQQYYSIPYTF | |
| | VYAPSDYWGQGTLVTVSS | | GQGTKVEIKR | |
| 260 | QVQLVQSGAEVKKPGASVKV | 2682 | DIQMTQSPSSLSASVGDRVTI | 2776 |
| | SCKASGYTFTNYYVHWVRQA | | TCRSSQSISTYLNWYQQKPG | |
| | PGQGLEWMGMINPSGGSTNY | | KAPKLLIYGASNLQSGVPSRF | |
| | AQKFQGRVTMTRDTSTSTVY | | SGSGSGTDFTLTISSLQPEDFA | |
| | MELSSLRSEDTAVYYCARVSG | | TYYCQQVISYPITFGGGTKVE | |
| | WKRGWFDPWGQGTLVTVSS | | IKR | |
| 261 | QVQLVQSGAEVKKPGASVKV | 2683 | DIVMTQSPDSLAVSLGERATI | 2777 |
| | SCKASGYTFTRYYMHWVRQA | | NCKSSQSISHSPNTRDYLAWY | |
| | PGQGLEWMGIINPSGGSASYA | | QQKPGQPPKLLIYWASTRESG | |
| | QKFQGRVTMTRDTSTSTVYM | | VPDRFSGSGSGTDFTLTISSLQ | |
| | ELSSLRSEDTAVYYCARDLGG | | AEDVAVYYCQQYYSSPFTFG | |
| | AAAGYFDYWGQGTLVTVSS | | PGTKVDIKR | |
| 262 | QVQLVQSGAEVKKPGASVKV | 2684 | EIVMTQSPATLSVSPGERATL | 2778 |
| | SCKASGFTFSDYGYYMHWVR | | SCRASQRVGNTYLAWYQQK | |
| | QAPGQGLEWMGWMDPSSGH | | PGQAPRLLIYDVSARASGIPA | |
| | TGYAQRFQGRVTMTRDTSTST | | RFSGSGSGTEFTLTISSLQSED | |
| | VYMELSSLRSEDTAVYYCAK | | FAVYYCQQYLSPPLTFGGGT | |
| | DIGWGAFDIWGQGTTVTVSS | | KVEIKR | |
| 263 | QVQLVQSGAEVKKPGSSVKV | 2685 | EIVMTQSPATLSVSPGERATL | 2779 |
| | SCKASGGTFSSYAISWVRQAP | | SCRASQSVSSSYLAWYQQKP | |
| | GQGLEWMGGIIPIVGVANYAQ | | GQAPRLLIYDVSTRATGIPAR | |
| | KLQGRVTITADESTSTAYMEL | | FSGSGSGTEFTLTISSLQSEDF | |
| | SSLRSEDTAVYYCAKDIGGYP | | AVYYCQQYGSSPITFGQGTK | |
| | SDAFDIWGQGTTVTVSS | | VEIKR | |
| 264 | QVQLVQSGAEVKKPGSSVKV | 2686 | DIQMTQSPSSLSASVGDRVTI | 2780 |
| | SCKASGYTLTELSMHWVRQA | | TCRASQDISNYLAWYQQKPG | |
| | PGQGLEWMGGIIPISSATSIPQ | | KAPKLLIYAASSLQSGVPSRF | |
| | KFQGRVTITADESTSTAYMEL | | SGSGSGTDFTLTISSLQPEDFA | |
| | SSLRSEDTAVYYCARGALYSS | | TYYCQQYYSYPLTFGGGTKV | |
| | SPVRVVAGTKGWFDPWGQGT | | EIKR | |
| | LVTVSS | | | |
| 265 | QVQLVQSGAEVKKPGSSVKV | 2687 | EIVMTQSPATLSVSPGERATL | 2781 |
| | SCKASGHTFTSDYMHWVRQA | | SCRASQSVNSEHLAWYQQKP | |
| | PGQGLEWMGRIIPIFGTADYA | | GQAPRLLIYDTSSRATGIPARF | |
| | QKFQGRVTITADESTSTAYME | | SGSGSGTEFTLTISSLQSEDFA | |
| | LSSLRSEDTAVYYCARDDSSG | | VYYCQQYGSSPVTFGQGTKV | |
| | IFDYWGQGTLVTVSS | | EIKR | |
| 266 | QVQLVQSGAEVKKPGSSVKV | 2688 | EIVMTQSPATLSVSPGERATL | 2782 |
| | SCKASGYSLTELSIHWVRQAP | | SCRASQSVGSQLGWYQQKPG | |
| | GQGLEWMGGINPISGTANYA | | QAPRLLIYGASTRATGIPARFS | |
| | QKFQGRVTITADESTSTAYME | | GSGSGTEFTLTISSLQSEDFAV | |
| | LSSLRSEDTAVYYCARGTVRL | | YYCQQSFSTPLTFGGGTKVEI | |
| | NWFDPWGQGTLVTVSS | | KR | |
| 267 | QVQLVQSGAEVKKPGSSVKV | 2689 | DIQMTQSPSSLSASVGDRVTI | 2783 |
| | SCKASGYTLTSFGISWVRQAP | | TCRASQDISNFVAWYQQKPG | |
| | GQGLEWVGMIIPLSGTTHYAQ | | KAPKLLIYAASSLQSGVPSRF | |
| | KFQGRVTITADESTSTAYMEL | | SGSGSGTDFTLTISSLQPEDFA | |
| | SSLRSEDTAVYYCANLYGGN | | TYYCQQSFDTPYTFGQGTKL | |
| | AYYYYGMDVWGQGTTVTVS | | EIKR | |
| | S | | | |
| 268 | QVQLVQSGAEVKKPGSSVKV | 2690 | EIVMTQSPATLSVSPGERATL | 2784 |
| | SCKASGGTESTYALSWVRQAP | | SCRASQSVNNNQLAWYQQK | |
| | GQGLEWMGGVIPVFGTTDYA | | PGQAPRLLIYDTSSRATGIPAR | |
| | HKFQGRVTITADESTSTAYME | | FSGSGSGTEFTLTISSLQSEDF | |
| | LSSLRSEDTAVYYCASMIIFGA | | AVYYCQQYDTSPYTFGQGTK | |
| | GGWDAYYFQEWGQGTLVTV | | VEIKR | |
| | SS | | | |
| 269 | QVQLVQSGAEVKKPGASVKV | 2691 | EIVMTQSPATLSVSPGERATL | 2785 |
| | SCKASGGSFSSYALHWVRQAP | | SCRASQSISSSYLAWYQQKPG | |
| | GQGLEWMGLINPSGGRTSYA | | QAPRLLIYDVSARATGIPARF | |
| | QKFQGRVTMTRDTSTSTVYM | | SGSGSGTEFTLTISSLQSEDFA | |
| | ELSSLRSEDTAVYYCARDEGY | | VYYCQQYYSTPLTFGPGTKV | |
| | ATFDYWGQGTLVTVSS | | DIKR | |
| 270 | QVQLVQSGAEVKKPGASVKV | 2692 | DIQMTQSPSSLSASVGDRVTI | 2786 |
| | SCKASGGTFSSYYMHWVRQA | | TCRASQSISSYLNWYQQKPG | |
| | PGQGLEWMGWISAYNGNTNY | | KAPKLLIYDASNLETGVPSRF | |
| | AQKLQGRVTMTRDTSTSTVY | | SGSGSGTDFTLTISSLQPEDFA | |
| | MELSSLRSEDTAVYYCAKDM | | TYYCQQTYTTPLTFGQGTKV | |
| | GYYYDSSGGFDYWGQGTLVT | | EIKR | |
| | VSS | | | |
| 271 | QVQLVQSGAEVKKPGSSVKV | 2693 | EIVMTQSPATLSVSPGERATL | 2787 |
| | SCKASGGTFSSYAISWVRQAP | | SCRASQSVSYNQLAWYQQKP | |
| | GQGLEWMGGIIPIFGTANYAQ | | GQAPRLLIYDISSRAAGIPARF | |
| | KFQGRVTITADESTSTAYMEL | | SGSGSGTEFTLTISSLQSEDFA | |
| | SSLRSEDTAVYYCARDLSIGY | | VYYCQQYGGLPATFGQGTRL | |
| | YGDAFDIWGQGTMVTVSS | | EIKR | |
| 272 | QVQLVQSGAEVKKPGSSVKV | 2694 | DIQMTQSPSSLSASVGDRVTI | 2788 |
| | SCKASGYIFTNYYIQWVRQAP | | TCQASQYISNYLNWYQQKPG | |
| | GQGLEWMGGIIPIFGTVGYAQ | | KAPKLLIYDASSLESGVPSRFS | |
| | KFQGRVTITADESTSTAYMEL | | GSGSGTDFTLTISSLQPEDFAT | |
| | SSLRSEDTAVYYCARGRIGGG | | YYCQQSYSTPYTFGQGTKLEI | |
| | NDYWGQGTLVTVSS | | KR | |
| 273 | QVQLVQSGAEVKKPGSSVKV | 2695 | EIVMTQSPATLSVSPGERATL | 2789 |
| | SCKASGDTFNSYAVNWVRQA | | SCRASQSVSSSSLAWYQQKP | |
| | PGQGLEWMGGIIPSFGTPTYA | | GQAPRLLIYDASTRASGIPAR | |
| | WKFQGRVTITADESTSTAYME | | FSGSGSGTEFTLTISSLQSEDF | |
| | LSSLRSEDTAVYYCASVSYGS | | AVYYCQQYNRLPYTFGQGTK | |
| | FDYWGQGTLVTVSS | | LEIKR | |
| 274 | QVQLVQSGAEVKKPGSSVKV | 2696 | DIVMTQSPDSLAVSLGERATI | 2790 |
| | SCKASGYTFTYRYLHWVRQA | | NCKSSQSVLYSSNNKNYLAW | |
| | PGQGLEWMGRITPISGTTNYA | | YQQKPGQPPKLLIYWASTRES | |
| | QKFQGRVTITADESTSTAYME | | GVPDRFSGSGSGTDFTLTISSL | |
| | LSSLRSEDTAVYYCAKDSGQL | | QAEDVAVYYCQQYYKTPLTF | |
| | AHYGMDVWGQGTTVTVSS | | GGGTKLEIKR | |
| 275 | QVQLVQSGAEVKKPGSSVKV | 2697 | DIQMTQSPSSLSASVGDRVTI | 2791 |
| | SCKASGYTFTSYYMHWVRQA | | TCRASQSISSYLNWYQQKPG | |
| | PGQGLEWMGWMNPYSGNTG | | KAPKLLIYAASSLQSGVPSRF | |
| | YAQKFQGRVTITADESTSTAY | | SGSGSGTDFTLTISSLQPEDFA | |
| | MELSSLRSEDTAVYYCARVGS | | TYYCQQSYSTPLTFGGGTKV | |
| | GWYSDYWGQGTLVTVSS | | EIKR | |
| 276 | QVQLVQSGAEVKKPGSSVKV | 2698 | EIVMTQSPATLSVSPGERATL | 2792 |
| | SCKASGYTFTRFNIHWVRQAP | | SCRASQSVSSYLAWYQQKPG | |
| | GQGLEWMGWLNPFTGNTGY | | QAPRLLIYDTSTRATGIPARFS | |
| | ARKFQGRVTITADESTSTAYM | | GSGSGTEFTLTISSLQSEDFAV | |
| | ELSSLRSEDTAVYYCASSSSW | | YYCQQYHSSPWTFGQGTKVE | |
| | YGWFDPWGQGTLVTVSS | | IKR | |
| 277 | QVQLVQSGAEVKKPGSSVKV | 2699 | EIVMTQSPATLSVSPGERATL | 2793 |
| | SCKASGYTFTGYYMHWVRQA | | SCRASQSVDNLVGWYQQKP | |
| | PGQGLEWMGWIDPNSGGTNY | | GQAPRLLIYDISSRATGIPARF | |
| | AQKFQGRVTITADESTSTAYM | | SGSGSGTEFTLTISSLQSEDFA | |
| | ELSSLRSEDTAVYYCARDVDT | | VYYCQQYGRSPITFGQGTRLE | |
| | AMVTDYWGRGTLVTVSS | | IKR | |
| 278 | QVQLVQSGAEVKKPGASVKV | 2700 | DIVMTQSPDSLAVSLGERATI | 2794 |
| | SCKASGYTFTSYYMHWVRQA | | NCKSSQSVLYSSNNENYLAW | |
| | PGQGLEWMGIINPSSGSTTYA | | YQQKPGQPPKLLIYWASTRES | |
| | QKFQGRVTMTRDTSTSTVYM | | GVPDRFSGSGSGTDFTLTISSL | |
| | ELSSLRSEDTAVYYCARSVGA | | QAEDVAVYYCQQYYSLPVTF | |
| | TSAFDIWGQGTMVTVSS | | GQGTKLEIKR | |
| 279 | QVQLVQSGAEVKKPGASVKV | 2701 | DIQMTQSPSSLSASVGDRVTI | 2795 |
| | SCKASGYTFTKYYMHWVRQA | | TCRASQSISSSLNWYQQKPGK | |
| | PGQGLEWMGIINPSGGSTSYA | | APKLLIYKASSLESGVPSRFSG | |
| | QKFQGRVTMTRDTSTSTVYM | | SGSGTDFTLTISSLQPEDFATY | |
| | ELSSLRSEDTAVYYCARGRGY | | YCQQYYSYPPTFGGGTKVEI | |
| | SYGYLDYWGQGTLVTVSS | | KR | |
| 280 | QVQLVQSGAEVKKPGASVKV | 2702 | DIQMTQSPSSLSASVGDRVTI | 2796 |
| | SCKASGYTFTRYYMHWVRQA | | TCQASQDISNYLNWYQQKPG | |
| | PGQGLEWMGIINPSGGSTSYA | | KAPKLLIYQASNKDTGVPSRF | |
| | QKFQGRVTMTRDTSTSTVYM | | SGSGSGTDFTLTISSLQPEDFA | |
| | ELSSLRSEDTAVYYCARGETR | | TYYCQQSYSTPPTFGQGTKLE | |
| | SYAPYGMDVWGQGTTVTVSS | | IKR | |
| 28 | QVQLVQSGAEVKKPGASVKV | 2703 | EIVMTQSPATLSVSPGERATL | 2797 |
| | SCKASGYTFNSYGISWVRQAP | | SCRASQSVSSSYLAWYQQKP | |
| | GQGLEWMGIINPTGGSTTYAQ | | GQAPRLLIYDASARAAGIPAR | |
| | KFQGRVTMTRDTSTSTVYME | | FSGSGSGTEFTLTISSLQSEDF | |
| | LSSLRSEDTAVYYCAKDPFVM | | AVYYCQQYYSTPYTFGQGTK | |
| | DVWGQGTTVTVSS | | LEIKR | |
| 282 | QVQLVQSGAEVKKPGASVKV | 2704 | EIVMTQSPATLSVSPGERATL | 2798 |
| | SCKASGGTFSSYAISWVRQAP | | SCRASRSISDYLAWYQQKPG | |
| | GQGLEWMGWMNPNSGDTGY | | QAPRLLIYDASSRATGIPARFS | |
| | AQKFQGRVTMTRDTSTSTVY | | GSGSGTEFTLTISSLQSEDFAV | |
| | MELSSLRSEDTAVYYCARDFE | | YYCQQYYTTPLTFGQGTKVE | |
| | GGGWFDPWGQGTLVTVSS | | IKR | |
| 283 | QVQLVQSGAEVKKPGASVKV | 2705 | DIQMTQSPSSLSASVGDRVTI | 2799 |
| | SCKASGYTFTSYYMDWVRQA | | TCRASQSISSYLNWYQQKPG | |
| | PGQGLEWMGRINPSSGSTTYV | | KAPKLLIYAASSLQSGVPSRF | |
| | QKFQGRVTMTRDTSTSTVYM | | SGSGSGTDFTLTISSLQPEDFA | |
| | ELSSLRSEDTAVYYCARTPSG | | TYYCQQSYSTPWTFGQGTKV | |
| | SYSDFDYWGQGTLVTVSS | | EIKR | |
| 284 | QVQLVQSGAEVKKPGASVKV | 2706 | DIQMTQSPSSLSASVGDRVTI | 2800 |
| | SCKASGYTFTSYYMHWVRQA | | TCRASHNISTWLAWYQQKPG | |
| | PGQGLEWMGVINPSGGSTTY | | KAPKLLIYAASSLQSGVPSRF | |
| | AQKFQGRVTMTRDTSTSTVY | | SGSGSGTDFTLTISSLQPEDFA | |
| | MELSSLRSEDTAVYYCARVPG | | TYYCQQSYSTPPTFGQGTRLE | |
| | VSPGDYGMDVWGQGTTVTVS | | IKR | |
| | S | | | |
| 285 | QVQLVQSGAEVKKPGSSVKV | 2707 | DIVMTQSPDSLAVSLGERATI | 2801 |
| | SCKASGYSFTNYYMHWVRQA | | NCKSSQSVLYSSNNKNYLAW | |
| | PGQGLEWMGGIIPVFGTTTYS | | YQQKPGQPPKLLIYWASTRES | |
| | QTFQGRVTITADESTSTAYME | | GVPDRFSGSGSGTDFTLTISSL | |
| | LSSLRSEDTAVYYCARESQDG | | QAEDVAVYYCQQYYSSPLTF | |
| | DFDYWGQGTLVTVSS | | GGGTKVEIKR | |
| 286 | QVQLVQSGAEVKKPGASVKV | 2708 | EIVMTQSPATLSVSPGERATL | 2802 |
| | SCKASGYTFTSYGISWVRQAP | | SCRASQSVSSSYLAWYQQKP | |
| | GQGLEWMGWISPNSGVTNYA | | GQAPRLLIYDVSTRASGIPAR | |
| | QKFQGRVTMTRDTSTSTVYM | | FSGSGSGTEFTLTISSLQSEDF | |
| | ELSSLRSEDTAVYYCVSDDYG | | AVYYCQQYNNWPYTFGQGT | |
| | AFDYWGQGTLVTVSS | | KLEIKR | |
| 287 | QVQLVQSGAEVKKPGASVKV | 2709 | DIQMTQSPSSLSASVGDRVTI | 2803 |
| | SCKASGYTFTRHYVHWVRQA | | TCRASQSISSSLAWYQQKPGK | |
| | PGQGLEWVGIINPSSGSASYA | | APKLLIYAASSLQSGVPSRFS | |
| | QKFQGRVTMTRDTSTSTVYM | | GSGSGTDFTLTISSLQPEDFAT | |
| | ELSSLRSEDTAVYYCARDRLR | | YYCQQSYTIPPTFGQGTKLEI | |
| | SRFDYWGQGTLVTVSS | | KR | |
| 288 | QVQLVQSGAEVKKPGASVKV | 2710 | DIQMTQSPSSLSASVGDRVTI | 2804 |
| | SCKASGYTFTTYDINWVRQAP | | TCRASQGISNNLNWYQQKPG | |
| | GQGLEWMGWMNPSSGNSGF | | KAPKLLIYKASTLESGVPSRF | |
| | AQQFQGRVTMTRDTSTSTVY | | SGSGSGTDFTLTISSLQPEDFA | |
| | MELSSLRSEDTAVYYCAREDY | | TYYCQQSYSTPITFGQGTKVE | |
| | YDSSGYYNWGQGTLVTVSS | | IKR | |
| 289 | QVQLVQSGAEVKKPGASVKV | 2711 | DIQMTQSPSSLSASVGDRVTI | 2805 |
| | SCKASGYTFTSYGISWVRQAP | | TCQASQGITSYLNWYQQKPG | |
| | GQGLEWMGWMNPISGNTDY | | KAPKLLIYKASSLESGVPSRFS | |
| | APNFQGRVTMTRDTSTSTVY | | GSGSGTDFTLTISSLQPEDFAT | |
| | MELSSLRSEDTAVYYCVVERR | | YYCQQGYSTPLTFGGGTKVEI | |
| | REVGMDVWGQGTTVTVSS | | KR | |
| 290 | QVQLVQSGAEVKKPGASVKV | 2712 | DIQMTQSPSSLSASVGDRVTI | 2806 |
| | SCKASGGTFTSYYMHWVRQA | | TCRASQSISSYLNWYQQKPG | |
| | PGQGLEWMGWISAYNGKTDY | | KAPKLLIYDASNLETGVPSRF | |
| | AQKFQGRVTMTRDTSTSTVY | | SGSGSGTDFTLTISSLQPEDFA | |
| | MELSSLRSEDTAVYYCARDQ | | TYYCQQTYSAPPTFGQGTKL | |
| | GYYYDSSGAFDIWGQGTLVT | | EIKR | |
| | VSS | | | |
| 291 | QVQLVQSGAEVKKPGASVKV | 2713 | DIVMTQSPLSLPVTPGEPASIS | 2807 |
| | SCKASGYTFTSYYMHWVRQA | | CRSSQSLLHSNGYNYLDWYL | |
| | PGQGLEWMGIINPSGGSTVYA | | QKPGQSPQLLIYLGSNRASGV | |
| | QTFQGRVTMTRDTSTSTVYM | | PDRFSGSGSGTDFTLKISRVE | |
| | ELSSLRSEDTAVYYCARGIGS | | AEDVGVYYCMQGLQTPYTF | |
| | KGAFDIWGQGTMVTVSS | | GQGTRLEIKR | |
| 292 | QVQLVQSGAEVKKPGASVKV | 2714 | DIQMTQSPSSLSASVGDRVTI | 2808 |
| | SCKASGYTFTSYGISWVRQAP | | TCRASQSISTYVNWYQQKPG | |
| | GQGLEWMGWINPNSGGTNYA | | KAPKLLIYDTSSLQSGVPSRFS | |
| | QKFQGRVTMTRDTSTSTVYM | | GSGSGTDFTLTISSLQPEDFAT | |
| | ELSSLRSEDTAVYYCARQGGL | | YYCQQSFITPPTFGQGTKLEIK | |
| | RDFDYWGQGTLVTVSS | | R | |
| 293 | QVQLVQSGAEVKKPGSSVKV | 2715 | DIVMTQSPLSLPVTPGEPASIS | 2809 |
| | SCKASGYMFTTPYIHWVRQAP | | CRSSQSLLHSNGYNYLDWYL | |
| | GQGLEWMGVINPISGTTTYAQ | | QKPGQSPQLLIYLGSNRASGV | |
| | KFQGRVTITADESTSTAYMEL | | PDRFSGSGSGTDFTLKISRVE | |
| | SSLRSEDTAVYYCANDRHYDF | | AEDVGVYYCMQALQTPTFG | |
| | WSGYYKEEWEYFQHWGQGT | | GGTKVEIKR | |
| | LVTVSS | | | |
| 294 | QVQLVQSGAEVKKPGASVKV | 2716 | DIQMTQSPSSLSASVGDRVTI | 2810 |
| | SCKASGYTFTSNNMHWVRQA | | TCRASQGIRNDLGWYQQKPG | |
| | PGQGLEWMGWINLNSGGTNY | | KAPKLLIYQASSLENGVPSRF | |
| | AQKFQGRVTMTRDTSTSTVY | | SGSGSGTDFTLTISSLQPEDFA | |
| | MELSSLRSEDTAVYYCAKAID | | TYYCQQAYSLPWTFGQGTKL | |
| | YYYMDVWGKGTTVTVSS | | EIKR | |

[1366] The polypeptides above were tested as disclosed above in Examples 4 and 5. Data is disclosed below in Table 18c, reporting FACS fold change over parental as (−), indicating <2 fold; (+), indicating 2-10 fold; (++), indicating 10-30 fold; and (+++), indicating >30 fold.

TABLE 18c
Polypeptide Activity (FACS & BLI)

| | FLT3 Mutant | FLT3 WT | FLT3 | |
|---|---|---|---|---|
| | Geometric Mean | Geometric Mean | Mutant BLI/Octet | FLT3 WT BLI/Octet |
| Polypeptide | Fold Change over | Fold Change over | Binding Summary | Binding Summary |
| No. | Jurkat Parental | Jurkat Parental | (Yes/No/Ambiguous) | (Yes/No/Ambiguous) |
| 201 | − | − | Yes | Yes |
| 202 | + | − | Yes | No |
| 203 | − | − | Yes | No |
| 204 | − | − | Ambiguous | Ambiguous |
| 205 | − | − | Yes | Yes |
| 206 | − | − | Yes | Yes |
| 207 | ++ | ++ | Yes | Yes |
| 208 | ++ | ++ | Yes | Yes |
| 209 | − | − | Yes | Yes |
| 210 | + | − | Yes | Yes |
| 211 | − | − | Ambiguous | Ambiguous |
| 212 | ++ | ++ | Yes | Yes |
| 213 | ++ | ++ | Yes | Yes |
| 214 | +++ | +++ | Yes | Yes |
| 215 | ++ | ++ | Yes | Yes |
| 216 | − | − | Yes | Yes |
| 217 | − | − | Yes | Yes |
| 218 | ++ | ++ | Yes | Yes |
| 219 | ++ | ++ | Yes | Yes |
| 220 | − | − | Yes | No |
| 221 | + | − | Yes | No |
| 222 | +++ | +++ | Yes | Yes |
| 223 | +++ | +++ | Yes | Yes |
| 224 | + | − | Yes | Yes |
| 225 | + | − | Yes | Yes |
| 226 | + | − | Yes | Yes |
| 227 | − | − | Yes | Yes |
| 228 | +++ | +++ | Yes | Yes |
| 229 | +++ | +++ | Yes | Yes |
| 230 | − | − | Yes | Yes |
| 231 | +++ | +++ | Yes | Yes |
| 232 | − | − | Yes | Yes |
| 233 | +++ | +++ | Yes | Yes |
| 234 | − | − | Yes | Yes |
| 235 | +++ | +++ | Yes | Yes |
| 236 | − | − | Yes | Yes |
| 237 | +++ | +++ | Yes | Yes |
| 238 | +++ | +++ | Yes | Yes |
| 239 | − | − | Yes | Yes |
| 240 | +++ | +++ | Yes | Yes |
| 241 | ++ | ++ | Yes | Yes |
| 242 | +++ | +++ | Yes | Yes |
| 243 | + | + | Yes | Yes |
| 244 | +++ | +++ | Yes | Yes |
| 245 | + | − | Yes | Yes |
| 246 | + | ++ | Yes | Yes |
| 247 | + | + | Yes | Yes |
| 248 | + | + | Yes | Yes |
| 249 | + | + | Yes | Yes |
| 250 | + | − | Yes | Yes |
| 251 | − | − | Yes | Yes |
| 252 | − | − | Yes | Yes |
| 253 | + | + | Yes | Yes |
| 254 | + | ++ | Yes | Yes |
| 255 | − | − | Yes | Yes |
| 256 | +++ | +++ | Yes | Yes |
| 257 | ++ | ++ | Yes | Yes |
| 258 | − | − | Ambiguous | Ambiguous |
| 259 | ++ | ++ | Yes | Yes |
| 260 | +++ | +++ | Yes | Yes |
| 261 | +++ | +++ | Yes | Yes |
| 262 | ++ | ++ | Yes | Yes |
| 263 | + | − | Yes | Yes |
| 264 | − | − | Yes | Yes |
| 265 | ++ | ++ | Yes | Yes |
| 266 | − | − | Yes | Yes |
| 267 | − | − | Yes | Yes |
| 268 | + | − | Yes | Yes |
| 269 | ++ | ++ | Yes | Yes |
| 270 | ++ | ++ | Yes | Yes |
| 271 | − | − | Yes | Yes |
| 272 | − | − | Yes | Yes |
| 273 | ++ | ++ | Yes | Yes |
| 274 | − | − | Yes | Yes |
| 275 | − | − | Yes | Yes |
| 276 | + | − | Yes | Yes |
| 277 | − | − | Yes | Yes |
| 278 | +++ | +++ | Yes | Yes |
| 279 | +++ | +++ | Yes | Yes |
| 280 | +++ | +++ | Yes | Yes |
| 281 | + | − | Yes | Yes |
| 282 | + | − | Yes | Yes |
| 283 | +++ | +++ | Yes | Yes |
| 284 | +++ | +++ | Yes | Yes |
| 285 | − | − | Yes | Yes |
| 286 | + | − | Yes | Yes |
| 287 | + | ++ | Yes | Yes |
| 288 | ++ | + | Yes | Yes |
| 289 | − | − | Yes | Yes |
| 290 | ++ | ++ | Yes | Yes |
| 291 | +++ | +++ | Yes | Yes |
| 292 | + | + | Yes | Yes |
| 293 | + | + | Yes | Yes |
| 294 | ++ | ++ | Yes | Yes |

[1367] The detailed description set-forth above is provided to aid those skilled in the art in practicing the present disclosure. However, the disclosure described and claimed herein is not to be limited in scope by the specific embodiments herein disclosed because these embodiments are intended as illustration of several aspects of the disclosure. Any equivalent embodiments are intended to be within the scope of this disclosure. Indeed, various modifications of the disclosure in addition to those shown and described herein will become apparent to those skilled in the art from the foregoing description, which do not depart from the spirit or scope of the present inventive discovery. Such modifications are also intended to fall within the scope of the appended claims.

1. A polypeptide which selectively binds a first polymorphic variant of a human cancer cell antigen over a second polymorphic variant of the human cancer cell antigen; or selectively binds the second polymorphic variant of the antigen over the first polymorphic variant of the antigen.

2. The polypeptide of claim 1, wherein the antigen is chosen from CD33, CLL-1, and FLT3.

3. (canceled)

4. A polypeptide which selectively binds a first polymorphic variant of CD33 over a second polymorphic variant of CD33; or selectively binds the second polymorphic variant of CD33 over the first polymorphic variant of CD33; wherein the binding is at least 2-fold selective.

5. (canceled)

6. (canceled)

7. The polypeptide of claim 4, wherein the first polymorphic variant of CD33 is R69 and the second polymorphic variant of CD33 is G69; or the first polymorphic variant of CD33 is G69 and the second polymorphic variant of CD33 is R69.

8. (canceled)

9. (canceled)

10. The polypeptide of claim 7, comprising three heavy chain variable (V_{H}) domain CDRs HCDR1, HCDR2, and HCDR3; wherein:
HCDR1 comprises an amino acid sequence with at least 95% sequence identity to an amino acid sequence chosen from SEQ ID NOs:1-25 and 201-217,
HCDR2 comprises an amino acid sequence with at least 95% sequence identity to an amino acid sequence chosen from SEQ ID NOs:26-50 and 218-234,
HCDR3 comprises an amino acid sequence with at least 95% sequence identity to an amino acid sequence chosen from SEQ ID NOs:51-75 and 235-251.

11. (canceled)

12. (canceled)

13. (canceled)

14. (canceled)

15. The polypeptide of claim 7, comprising three light chain variable (V_{L}) domain CDRs LCDR1, LCDR2, and LCDR3, wherein:
LCDR1 comprises an amino acid sequence with at least 95% sequence identity to an amino acid sequence chosen from SEQ ID NOs:76-100 and 252-268,
LCDR2 comprises an amino acid sequence with at least 95% sequence identity to an amino acid sequence chosen from SEQ ID NOs:101-125 and 269-285, and
LCDR3 comprises an amino acid sequence with at least 95% sequence identity to an amino acid sequence chosen from SEQ ID NOs:126-150 and 286-302.

16. (canceled)

17. (canceled)

18. (canceled)

19. (canceled)

20. The polypeptide of claim 7, comprising a V_{H} domain having an amino acid sequence exhibiting at least 95% sequence identity to a sequence chosen from any of SEQ ID NOs 151-175 and 303-319.

21. (canceled)

22. (canceled)

23. (canceled)

24. (canceled)

25. The polypeptide of claim 7, comprising a V_{L} domain having an amino acid sequence exhibiting at least 95% sequence identity to a sequence chosen from any of SEQ ID NOs 176-200 and 320-336.

26. (canceled)

27. (canceled)

28. (canceled)

29. (canceled)

30. (canceled)

31. (canceled)

32. (canceled)

33. (canceled)

34. (canceled)

35. A polypeptide which selectively binds a first polymorphic variant of FLT3 over a second polymorphic variant of FLT3; or selectively binds the second polymorphic variant of FLT3 over the first polymorphic variant; wherein the binding is at least 2-fold selective.

36. (canceled)

37. (canceled)

38. The polypeptide of claim 35, wherein the first polymorphic variant of FLT3 is T227 and the second polymorphic variant of FLT3 is M227; or first polymorphic variant of FLT3 is M227 and the second polymorphic variant of FLT3 is T227.

39. (canceled)

40. A polypeptide which selectively binds a first polymorphic variant of CLL-1 over a second polymorphic variant of CLL-1; or selectively binds the second polymorphic variant of CLL-1 over the first polymorphic variant; wherein the binding is at least 2-fold selective.

41. (canceled)

42. (canceled)

43. The polypeptide of claim 40, wherein the first polymorphic variant of CLL-1 is K224 and the second polymorphic variant of CLL-1 is Q244; or first polymorphic variant of CLL-1 is Q224 and the second polymorphic variant of CLL-1 is K244.

44. (canceled)

45. (canceled)

46. The polypeptide of claim 43, comprising three heavy chain variable (V_{H}) domain CDRs HCDR1, HCDR2, and HCDR3, wherein:
HCDR1 comprises an amino acid sequence with at least 95% sequence identity to an amino acid sequence chosen from SEQ ID NOs:337-360- and 529-550,
HCDR2 comprises an amino acid sequence with at least 95% sequence identity to an amino acid sequence chosen from SEQ ID NOs:361-384 and 551-572, and
HCDR3 comprises an amino acid sequence with at least 95% sequence identity to an amino acid sequence chosen from SEQ ID NOs:385-408 and 573-594.

47. (canceled)

48. (canceled)

49. (canceled)

50. (canceled)

51. The polypeptide of claim 43, comprising three light chain variable (V_{L}) domain CDRs LCDR1, LCDR2, and LCDR3, wherein:
LCDR1 comprises an amino acid sequence with at least 95% sequence identity to an amino acid sequence chosen from SEQ ID NOs:409-432 and 595-616,
LCDR2 comprises an amino acid sequence with at least 95% sequence identity to an amino acid sequence chosen from SEQ ID NOs:433-456 and 617-638, and
LCDR3 comprises an amino acid sequence with at least 95% sequence identity to an amino acid sequence chosen from SEQ ID NOs:457-480 and 639-660.

52. (canceled)

53. (canceled)

54. (canceled)

55. (canceled)

56. The polypeptide of claim 43, comprising a V_{H} domain having an amino acid sequence exhibiting at least 95% sequence identity to a sequence chosen from any of SEQ ID NOs 151-175 and 303-319.

57. (canceled)

58. (canceled)

59. (canceled)

60. (canceled)

61. The polypeptide of claim 43, comprising a V_{L} domain having an amino acid sequence exhibiting at least 95% sequence identity to a sequence chosen from any of SEQ ID NOs 176-200 and 320-336.

62.-69. (canceled)

70. A single-chain variable fragment (scFv) comprising the polypeptide of claim 1.

71. A monoclonal antibody (mAb), or an antigen-binding fragment thereof, comprising the polypeptide of claim 1.

72.-77. (canceled)

78. An antibody-drug conjugate (ADC) comprising the mAb, or antigen-binding fragment thereof, of claim 71.

79. (canceled)

80. (canceled)

81. A chimeric antigen receptor (CAR) comprising an extracellular ligand binding domain comprising a polypeptide of claim 1.

82.-94. (canceled)

95. A nucleotide sequence encoding any of the polypeptides, scFvs, mAbs, or CARs of claim 1.

96. A vector comprising the nucleotide sequence of claim 95.

97. (canceled)

98. (canceled)

99. An engineered immune effector cell expressing at the cell surface a CAR of claim 81.

100.-113. (canceled)

114. A method of treatment of a subject in need thereof, who has a first polymorphic variant of an antigen on the surface of a target cell, comprising:
a. optionally, treating the subject with one or more conditioning regimens to deplete the subject of target cells bearing the first polymorphic variant of the antigen;
b. administering to the subject either:
a population of engineered immune effector cells that express a chimeric antigen receptor (CAR) that selectively binds the first polymorphic variant of the antigen on the surface of the target cell; or
a monoclonal antibody (mAb), or antigen-binding fragment thereof, that selectively binds the first polymorphic variant of the antigen on the surface of the target cell; or
an antibody-drug conjugate (ADC) comprising monoclonal antibody (mAb), or antigen-binding fragment thereof, that selectively binds the first polymorphic variant of the antigen on the surface of the target cell; and
c. administering to the subject a population of donor hematopoietic cells, a plurality of which comprise a second polymorphic variant of the antigen;
wherein the administering of the hematopoietic cells, and the administering of the CAR-expressing cells, mAb, or ADC, may be done concurrently, or sequentially in either order.

115. A method of immunotherapy of a human subject in need thereof, who has a first polymorphic variant of an antigen on the surface of a target cell, comprising:
a. optionally, treating the subject with one or more conditioning regimens to deplete the subject of target cells bearing the first polymorphic variant of the antigen;
b. administering to the subject a population of donor hematopoietic cells, a plurality of which comprise a second polymorphic variant of the antigen; and
c. administering to the subject:
a population of engineered immune effector cells that express a chimeric antigen receptor (CAR) that specifically binds the first polymorphic variant of an antigen on the surface of a target cell; or
a monoclonal antibody (mAb) or antigen-binding fragment thereof, that selectively binds the first polymorphic variant of the antigen on the surface of the target cell; or
an antibody-drug conjugate (ADC) comprising a monoclonal antibody (mAb), or antigen-binding fragment thereof, that selectively binds the first polymorphic variant of the antigen on the surface of the target cell.

116. A method of treatment of a subject in need thereof, who has a first polymorphic variant of an antigen on the surface of a target cell, comprising:
a. administering to the subject:
a population of engineered immune effector cells that express a chimeric antigen receptor (CAR) which binds the antigen on the surface of the target cell; or
a monoclonal antibody (mAb) which binds the antigen on the surface of the target cell; or
an antibody-drug conjugate (ADC) comprising a monoclonal antibody (mAb) which binds the antigen on the surface of the target cell; and
b. optionally, treating the subject with one or more conditioning regimens to deplete the subject of target cells bearing the first polymorphic variant of the antigen;
c. administering to the subject either:
a population of engineered immune effector cells that express a chimeric antigen receptor (CAR) that selectively binds the first polymorphic variant of the antigen on the surface of the target cell; or
a monoclonal antibody (mAb), or antigen-binding fragment thereof, that selectively binds the first polymorphic variant of the antigen on the surface of the target cell; or
an antibody-drug conjugate (ADC) comprising a monoclonal antibody (mAb), or antigen-binding fragment thereof, that selectively binds the first polymorphic variant of the antigen on the surface of the target cell; and
d. administering to the subject a population of donor hematopoietic cells, a plurality of which comprise a second polymorphic variant of the antigen;
wherein the administering of the hematopoietic cells, and the administering of the CAR-expressing cells, mAb, or ADC, may be done concurrently, or sequentially in either order.

117.-153. (canceled)

The application's sequence listing, which the Patent Office published only in electronic form, follows.

SEQUENCE LISTING (2810 sequences)

SEQ ID NO: 1 - protein, 9 aa, synthetic construct
  REGION 1..9: note = Anti-CD33 R69-Selective HCDR1
YSFTGYYIH

SEQ ID NO: 2 - protein, 9 aa, synthetic construct
  REGION 1..9: note = Anti-CD33 R69-Selective HCDR1
FTFSDYYMS

SEQ ID NO: 3 - protein, 9 aa, synthetic construct
  REGION 1..9: note = Anti-CD33 R69-Selective HCDR1
FTFSNSDMN

SEQ ID NO: 4 - protein, 9 aa, synthetic construct
  REGION 1..9: note = Anti-CD33 R69-Selective HCDR1
GTFSSYAIS

SEQ ID NO: 5 - protein, 9 aa, synthetic construct
  REGION 1..9: note = Anti-CD33 R69-Selective HCDR1
NTFTSYGIS

SEQ ID NO: 6 - protein, 9 aa, synthetic construct
  REGION 1..9: note = Anti-CD33 R69-Selective HCDR1
YTFTAYYTH

SEQ ID NO: 7 - protein, 9 aa, synthetic construct
  REGION 1..9: note = Anti-CD33 R69-Selective HCDR1
YTFTDYYMH

SEQ ID NO: 8 - protein, 9 aa, synthetic construct
  REGION 1..9: note = Anti-CD33 R69-Selective HCDR1
FTFSSYAMS

SEQ ID NO: 9 - protein, 9 aa, synthetic construct
  REGION 1..9: note = Anti-CD33 R69-Selective HCDR1
GTFSSDAIN

SEQ ID NO: 10 - protein, 9 aa, synthetic construct
  REGION 1..9: note = Anti-CD33 R69-Selective HCDR1
DTFTTYAIS

SEQ ID NO: 11 - protein, 9 aa, synthetic construct
  REGION 1..9: note = Anti-CD33 R69-Selective HCDR1
DTFTNHYMH

SEQ ID NO: 12 - protein, 9 aa, synthetic construct
  REGION 1..9: note = Anti-CD33 R69-Selective HCDR1
FTFSSHWMS

SEQ ID NO: 13 - protein, 9 aa, synthetic construct
  REGION 1..9: note = Anti-CD33 R69-Selective HCDR1
YSFTGYYMH

SEQ ID NO: 14 - protein, 9 aa, synthetic construct
  REGION 1..9: note = Anti-CD33 R69-Selective HCDR1
YTFTGYYMH

SEQ ID NO: 15 - protein, 9 aa, synthetic construct
  REGION 1..9: note = Anti-CD33 R69-Selective HCDR1
FTFSIYEIH

SEQ ID NO: 16 - protein, 9 aa, synthetic construct
  REGION 1..9: note = Anti-CD33 R69-Selective HCDR1
FTFSDNSMN

SEQ ID NO: 17 - protein, 9 aa, synthetic construct
  REGION 1..9: note = Anti-CD33 R69-Selective HCDR1
FTFSSYAMS

SEQ ID NO: 18 - protein, 9 aa, synthetic construct
  REGION 1..9: note = Anti-CD33 R69-Selective HCDR1
YTFTDHYMH

SEQ ID NO: 19 - protein, 9 aa, synthetic construct
  REGION 1..9: note = Anti-CD33 R69-Selective HCDR1
FTFSSYWMH

SEQ ID NO: 20 - protein, 9 aa, synthetic construct
  REGION 1..9: note = Anti-CD33 R69-Selective HCDR1
YMFTGYYIH

SEQ ID NO: 21 - protein, 9 aa, synthetic construct
  REGION 1..9: note = Anti-CD33 R69-Selective HCDR1
FTFSSYAMS

SEQ ID NO: 22 - protein, 9 aa, synthetic construct
  REGION 1..9: note = Anti-CD33 R69-Selective HCDR1
YTFTDYYIH

SEQ ID NO: 23 - protein, 9 aa, synthetic construct
  REGION 1..9: note = Anti-CD33 R69-Selective HCDR1
YPFTAHYIH

SEQ ID NO: 24 - protein, 9 aa, synthetic construct
  REGION 1..9: note = Anti-CD33 R69-Selective HCDR1
YSFTSYGIS

SEQ ID NO: 25 - protein, 9 aa, synthetic construct
  REGION 1..9: note = Anti-CD33 R69-Selective HCDR1
YTFTGYYMH

SEQ ID NO: 26 - protein, 13 aa, synthetic construct
  REGION 1..13: note = Anti-CD33 R69-Selective HCDR2
GWINPNSGGTNYA

SEQ ID NO: 27 - protein, 13 aa, synthetic construct
  REGION 1..13: note = Anti-CD33 R69-Selective HCDR2
SGISGSGYSTYYA

SEQ ID NO: 28 - protein, 13 aa, synthetic construct
  REGION 1..13: note = Anti-CD33 R69-Selective HCDR2
SAISGSGGSTYYA

SEQ ID NO: 29 - protein, 13 aa, synthetic construct
  REGION 1..13: note = Anti-CD33 R69-Selective HCDR2
GWINPNSGNTGYA

SEQ ID NO: 30 - protein, 13 aa, synthetic construct
  REGION 1..13: note = Anti-CD33 R69-Selective HCDR2
GWINPNSGGTKYA

SEQ ID NO: 31 - protein, 13 aa, synthetic construct
  REGION 1..13: note = Anti-CD33 R69-Selective HCDR2
GWMNPNSGHTSYA

SEQ ID NO: 32 - protein, 13 aa, synthetic construct
  REGION 1..13: note = Anti-CD33 R69-Selective HCDR2
GWINPNSGGTNYA

SEQ ID NO: 33 - protein, 13 aa, synthetic construct
  REGION 1..13: note = Anti-CD33 R69-Selective HCDR2
SDISGSGSGTYYA

SEQ ID NO: 34 - protein, 13 aa, synthetic construct
  REGION 1..13: note = Anti-CD33 R69-Selective HCDR2
GGFDPEDGETIYA

SEQ ID NO: 35 - protein, 13 aa, synthetic construct
  REGION 1..13: note = Anti-CD33 R69-Selective HCDR2
GWINPNSGVATYA

SEQ ID NO: 36 - protein, 13 aa, synthetic construct
  REGION 1..13: note = Anti-CD33 R69-Selective HCDR2
GWINPNSGGTNYA

SEQ ID NO: 37 - protein, 13 aa, synthetic construct
  REGION 1..13: note = Anti-CD33 R69-Selective HCDR2
SAISGSGGSTYYA

SEQ ID NO: 38 - protein, 13 aa, synthetic construct
  REGION 1..13: note = Anti-CD33 R69-Selective HCDR2
GWINPNSGGTYFA

SEQ ID NO: 39 - protein, 13 aa, synthetic construct
  REGION 1..13: note = Anti-CD33 R69-Selective HCDR2
GIINPSGGSTSYA

SEQ ID NO: 40 - protein, 13 aa, synthetic construct
  REGION 1..13: note = Anti-CD33 R69-Selective HCDR2
SAISGSGGSTYYA

SEQ ID NO: 41 - protein, 13 aa, synthetic construct
  REGION 1..13: note = Anti-CD33 R69-Selective HCDR2
SYISSSGSTIYYA

SEQ ID NO: 42 - protein, 13 aa, synthetic construct
  REGION 1..13: note = Anti-CD33 R69-Selective HCDR2
SGISYDSDKIGYA

SEQ ID NO: 43 - protein, 13 aa, synthetic construct
  REGION 1..13: note = Anti-CD33 R69-Selective HCDR2
GWINPNSGGTNYA

SEQ ID NO: 44 - protein, 12 aa, synthetic construct
  REGION 1..12: note = Anti-CD33 R69-Selective HCDR2
SGFSGSARTYYA

SEQ ID NO: 45 - protein, 13 aa, synthetic construct
  REGION 1..13: note = Anti-CD33 R69-Selective HCDR2
GWINPNSGGTNYA

SEQ ID NO: 46 - protein, 13 aa, synthetic construct
  REGION 1..13: note = Anti-CD33 R69-Selective HCDR2
SAISGSGGSTYYA

SEQ ID NO: 47 - protein, 13 aa, synthetic construct
  REGION 1..13: note = Anti-CD33 R69-Selective HCDR2
GWINPNSGGTNYA

SEQ ID NO: 48 - protein, 13 aa, synthetic construct
  REGION 1..13: note = Anti-CD33 R69-Selective HCDR2
GWINPNSGGTNYA

SEQ ID NO: 49 - protein, 13 aa, synthetic construct
  REGION 1..13: note = Anti-CD33 R69-Selective HCDR2
GWISAYNGNTNYG

SEQ ID NO: 50 - protein, 13 aa, synthetic construct
  REGION 1..13: note = Anti-CD33 R69-Selective HCDR2
GRINPNGGSTTYA

SEQ ID NO: 51 - protein, 17 aa, synthetic construct
  REGION 1..17: note = Anti-CD33 R69-Selective HCDR3
CARDQWDGYNSGYFDYW

SEQ ID NO: 52 - protein, 16 aa, synthetic construct
  REGION 1..16: note = Anti-CD33 R69-Selective HCDR3
CARTFGRGPDWYFDLW

SEQ ID NO: 53 - protein, 17 aa, synthetic construct
  REGION 1..17: note = Anti-CD33 R69-Selective HCDR3
CARGREDDYGDYVFDYW

SEQ ID NO: 54 - protein, 11 aa, synthetic construct
  REGION 1..11: note = Anti-CD33 R69-Selective HCDR3
CAREHGDMDVW

SEQ ID NO: 55 - protein, 17 aa, synthetic construct
  REGION 1..17: note = Anti-CD33 R69-Selective HCDR3
CARESWFGELYYGMDVW

SEQ ID NO: 56 - protein, 12 aa, synthetic construct
  REGION 1..12: note = Anti-CD33 R69-Selective HCDR3
CAREAYDSFDYW

SEQ ID NO: 57 - protein, 17 aa, synthetic construct
  REGION 1..17: note = Anti-CD33 R69-Selective HCDR3
CARDSRIAVAASSFDYW

SEQ ID NO: 58 - protein, 13 aa, synthetic construct
  REGION 1..13: note = Anti-CD33 R69-Selective HCDR3
CARPGSDGEFDYW

SEQ ID NO: 59 - protein, 15 aa, synthetic construct
  REGION 1..15: note = Anti-CD33 R69-Selective HCDR3
CARGPSGYDFEFDYW

SEQ ID NO: 60 - protein, 16 aa, synthetic construct [sequence omitted]

SEQ ID NO: 61 - protein, 17 aa, synthetic construct
  REGION 1..17: note = Anti-CD33 R69-Selective HCDR3
CARDLVPAAVGGYFDYW

SEQ ID NO: 62 - protein, 13 aa, synthetic construct
  REGION 1..13: note = Anti-CD33 R69-Selective HCDR3
CARDDNSGSQADW

SEQ ID NO: 63 - protein, 17 aa, synthetic construct
  REGION 1..17: note = Anti-CD33 R69-Selective HCDR3
CVKDRGDRVVTSYLDYW

SEQ ID NO: 64 - protein, 24 aa, synthetic construct
  REGION 1..24: note = Anti-CD33 R69-Selective HCDR3
CARAAPYYYDSSGYYSGGYYFDYW

SEQ ID NO: 65 - protein, 22 aa, synthetic construct
  REGION 1..22: note = Anti-CD33 R69-Selective HCDR3
CARSYCGGDCWDYYYYYGMDVW

SEQ ID NO: 66 - protein, 16 aa, synthetic construct
  REGION 1..16: note = Anti-CD33 R69-Selective HCDR3
CARGRASSWPNWFDPW

SEQ ID NO: 67 - protein, 11 aa, synthetic construct
  REGION 1..11: note = Anti-CD33 R69-Selective HCDR3
CAREWEGFDYW

SEQ ID NO: 68 - protein, 20 aa, synthetic construct
  REGION 1..20: note = Anti-CD33 R69-Selective HCDR3
CAKDKFGDEGSGWYGDFQHW

SEQ ID NO: 69 - protein, 11 aa, synthetic construct
  REGION 1..11: note = Anti-CD33 R69-Selective HCDR3
CAREWSGFDYW

SEQ ID NO: 70 - protein, 17 aa, synthetic construct
  REGION 1..17: note = Anti-CD33 R69-Selective HCDR3
CAKDRFGSGNYGYMDVW

SEQ ID NO: 71 - protein, 18 aa, synthetic construct
  REGION 1..18: note = Anti-CD33 R69-Selective HCDR3
CARELSHDYGGNSDFDYW

SEQ ID NO: 72 - protein, 17 aa, synthetic construct
  REGION 1..17: note = Anti-CD33 R69-Selective HCDR3
CARDHRIAVAGSYFDYW

SEQ ID NO: 73 - protein, 19 aa, synthetic construct
  REGION 1..19: note = Anti-CD33 R69-Selective HCDR3
CARDVEMATIGAYWYFDLW

SEQ ID NO: 74 - protein, 14 aa, synthetic construct
  REGION 1..14: note = Anti-CD33 R69-Selective HCDR3
CARARGAGTFFDYW

SEQ ID NO: 75 - protein, 14 aa, synthetic construct
  REGION 1..14: note = Anti-CD33 R69-Selective HCDR3
CARDDFYYYYLDFW

SEQ ID NO: 76 - protein, 11 aa, synthetic construct
  REGION 1..11: note = Anti-CD33 R69-Selective LCDR1
RASQTINDWLA

SEQ ID NO: 77 - protein, 11 aa, synthetic construct
  REGION 1..11: note = Anti-CD33 R69-Selective LCDR1
RASQSISRYLN

SEQ ID NO: 78 - protein, 11 aa, synthetic construct
  REGION 1..11: note = Anti-CD33 R69-Selective LCDR1
RASQSISSYLN

SEQ ID NO: 79 - protein, 11 aa, synthetic construct
  REGION 1..11: note = Anti-CD33 R69-Selective LCDR1
RASQNINSDLA

SEQ ID NO: 80 - protein, 16 aa, synthetic construct
  REGION 1..16: note = Anti-CD33 R69-Selective LCDR1
RSSQSLLHSNGYNYLD

SEQ ID NO: 81 - protein, 11 aa, synthetic construct
  REGION 1..11: note = Anti-CD33 R69-Selective LCDR1
RASQSISSYLN

SEQ ID NO: 82 - protein, 11 aa, synthetic construct
  REGION 1..11: note = Anti-CD33 R69-Selective LCDR1
RASRGINNWLT

SEQ ID NO: 83 - protein, 11 aa, synthetic construct
  REGION 1..11: note = Anti-CD33 R69-Selective LCDR1
RASQSVSSFLN

SEQ ID NO: 84 - protein, 11 aa, synthetic construct
  REGION 1..11: note = Anti-CD33 R69-Selective LCDR1
RSSRNISHWLA

SEQ ID NO: 85 - protein, 17 aa, synthetic construct
  REGION 1..17: note = Anti-CD33 R69-Selective LCDR1
KSSQSVLHSSKNKNYLA

SEQ ID NO: 86 - protein, 11 aa, synthetic construct
  REGION 1..11: note = Anti-CD33 R69-Selective LCDR1
RASQSLGSWLA

SEQ ID NO: 87 - protein, 11 aa, synthetic construct
  REGION 1..11: note = Anti-CD33 R69-Selective LCDR1
QASQDIDNYLN

SEQ ID NO: 88 - protein, 11 aa, synthetic construct
  REGION 1..11: note = Anti-CD33 R69-Selective LCDR1
RASQGIRNWLA

SEQ ID NO: 89 - protein, 17 aa, synthetic construct
  REGION 1..17: note = Anti-CD33 R69-Selective LCDR1
KSSQSVLYSSNNKNYLA

SEQ ID NO: 90 - protein, 16 aa, synthetic construct
  REGION 1..16: note = Anti-CD33 R69-Selective LCDR1
RSSQSLLHSNGYNYLD

SEQ ID NO: 91 - protein, 16 aa, synthetic construct
  REGION 1..16: note = Anti-CD33 R69-Selective LCDR1
RSSQSLLHSNGYNYLD

SEQ ID NO: 92 - protein, 11 aa, synthetic construct
  REGION 1..11: note = Anti-CD33 R69-Selective LCDR1
RASQGISNNLN

SEQ ID NO: 93 - protein, 16 aa, synthetic construct
  REGION 1..16: note = Anti-CD33 R69-Selective LCDR1
RSSQSLLHSNGYNYLD

SEQ ID NO: 94 - protein, 11 aa, synthetic construct
  REGION 1..11: note = Anti-CD33 R69-Selective LCDR1
RASQNIGPWLA

SEQ ID NO: 95 - protein, 11 aa, synthetic construct
  REGION 1..11: note = Anti-CD33 R69-Selective LCDR1
RASQSIDRWLA

SEQ ID NO: 96 - protein, 11 aa, synthetic construct
  REGION 1..11: note = Anti-CD33 R69-Selective LCDR1
QASQDISNNLN

SEQ ID NO: 97 - protein, 11 aa, synthetic construct
  REGION 1..11: note = Anti-CD33 R69-Selective LCDR1
RASRSIRTWLA

SEQ ID NO: 98 - protein, 11 aa, synthetic construct
  REGION 1..11: note = Anti-CD33 R69-Selective LCDR1
RASQGINNWLA

SEQ ID NO: 99 - protein, 16 aa, synthetic construct
  REGION 1..16: note = Anti-CD33 R69-Selective LCDR1
RSSQSLLHSNGYNYLD

SEQ ID NO: 100 - protein, 11 aa, synthetic construct
  REGION 1..11: note = Anti-CD33 R69-Selective LCDR1
RASQSINDWLA

SEQ ID NO: 101 - protein, 7 aa, synthetic construct
  REGION 1..7: note = Anti-CD33 R69-Selective LCDR2
SASTLHS

SEQ ID NO: 102 - protein, 7 aa, synthetic construct
  REGION 1..7: note = Anti-CD33 R69-Selective LCDR2
TASTLQS

SEQ ID NO: 103 - protein, 7 aa, synthetic construct
  REGION 1..7: note = Anti-CD33 R69-Selective LCDR2
GASTLHS

SEQ ID NO: 104 - protein, 7 aa, synthetic construct
  REGION 1..7: note = Anti-CD33 R69-Selective LCDR2
GASTRAT

SEQ ID NO: 105 - protein, 7 aa, synthetic construct
  REGION 1..7: note = Anti-CD33 R69-Selective LCDR2
LGSDRAS

SEQ ID NO: 106 - protein, 7 aa, synthetic construct
  REGION 1..7: note = Anti-CD33 R69-Selective LCDR2
EASTLET

SEQ ID NO: 107 - protein, 7 aa, synthetic construct
  REGION 1..7: note = Anti-CD33 R69-Selective LCDR2
GASSLQS

SEQ ID NO: 108 - protein, 7 aa, synthetic construct
  REGION 1..7: note = Anti-CD33 R69-Selective LCDR2
AASSLQS

SEQ ID NO: 109 - protein, 7 aa, synthetic construct
  REGION 1..7: note = Anti-CD33 R69-Selective LCDR2
KASSLES

SEQ ID NO: 110 - protein, 7 aa, synthetic construct
  REGION 1..7: note = Anti-CD33 R69-Selective LCDR2
WASTRES

SEQ ID NO: 111 - protein, 7 aa, synthetic construct
  REGION 1..7: note = Anti-CD33 R69-Selective LCDR2
AASSLQS

SEQ ID NO: 112 - protein, 7 aa, synthetic construct
  REGION 1..7: note = Anti-CD33 R69-Selective LCDR2
DASNLET

SEQ ID NO: 113 - protein, 7 aa, synthetic construct
  REGION 1..7: note = Anti-CD33 R69-Selective LCDR2
AASSLQS

SEQ ID NO: 114 - protein, 7 aa, synthetic construct
  REGION 1..7: note = Anti-CD33 R69-Selective LCDR2
WASTRES

SEQ ID NO: 115 - protein, 7 aa, synthetic construct
  REGION 1..7: note = Anti-CD33 R69-Selective LCDR2
LASNRAS

SEQ ID NO: 116 - protein, 7 aa, synthetic construct
  REGION 1..7: note = Anti-CD33 R69-Selective LCDR2
SASNLQS

SEQ ID NO: 117 - protein, 7 aa, synthetic construct
  REGION 1..7: note = Anti-CD33 R69-Selective LCDR2
ESSTLET

SEQ ID NO: 118 - protein, 7 aa, synthetic construct
  REGION 1..7: note = Anti-CD33 R69-Selective LCDR2
LGSNRAS

SEQ ID NO: 119 - protein, 7 aa, synthetic construct
  REGION 1..7: note = Anti-CD33 R69-Selective LCDR2
DAKDLHP

SEQ ID NO: 120 - protein, 7 aa, synthetic construct
  REGION 1..7: note = Anti-CD33 R69-Selective LCDR2
GASSLQS

SEQ ID NO: 121 - protein, 7 aa, synthetic construct
  REGION 1..7: note = Anti-CD33 R69-Selective LCDR2
AASGLQS

SEQ ID NO: 122 - protein, 7 aa, synthetic construct
  REGION 1..7: note = Anti-CD33 R69-Selective LCDR2
AASSLQT

SEQ ID NO: 123 - protein, 7 aa, synthetic construct
  REGION 1..7: note = Anti-CD33 R69-Selective LCDR2
DASNLET

SEQ ID NO: 124 - protein, 7 aa, synthetic construct
  REGION 1..7: note = Anti-CD33 R69-Selective LCDR2
DATNLPT

SEQ ID NO: 125 - protein, 7 aa, synthetic construct
  REGION 1..7: note = Anti-CD33 R69-Selective LCDR2
AASNLQS

SEQ ID NO: 126 - protein, 11 aa, synthetic construct
  REGION 1..11: note = Anti-CD33 R69-Selective LCDR3
CQQAYSTPWTF

SEQ ID NO: 127 - protein, 11 aa, synthetic construct [sequence omitted]

SEQ ID NO: 128 - protein, 11 aa, synthetic construct [sequence omitted]

SEQ ID NO: 129 - protein, 11 aa, synthetic construct [sequence omitted]

SEQ ID NO: 130 - protein, 11 aa, synthetic construct [sequence omitted]

SEQ ID NO: 131 - protein, 11 aa, synthetic construct [sequence omitted]

SEQ ID NO: 132 - protein, 11 aa, synthetic construct [sequence omitted]

SEQ ID NO: 133 - protein, 11 aa, synthetic construct [sequence omitted]

SEQ ID NO: 134 - protein, 11 aa, synthetic construct [sequence omitted]

SEQ ID NO: 135 - protein, 11 aa, synthetic construct [sequence omitted]

SEQ ID NO: 136 - protein, 11 aa, synthetic construct [sequence omitted]

SEQ ID NO: 137 - protein, 11 aa, synthetic construct [sequence omitted]

SEQ ID NO: 138 - protein, 11 aa, synthetic construct [sequence omitted]

SEQ ID NO: 139 - protein, 11 aa, synthetic construct [sequence omitted]

SEQ ID NO: 140 - protein, 11 aa, synthetic construct
  REGION 1..11: note = Anti-CD33 R69-Selective LCDR3
CKQTSHIPLTF

SEQ ID NO: 141 - protein, 11 aa, synthetic construct [sequence omitted]

SEQ ID NO: 142 - protein, 11 aa, synthetic construct [sequence omitted]

SEQ ID NO: 143 - protein, 11 aa, synthetic construct [sequence omitted]

SEQ ID NO: 144 - protein, 11 aa, synthetic construct
  REGION 1..11: note = Anti-CD33 R69-Selective LCDR3
CQQANTFPMTF

SEQ ID NO: 145 - protein, 11 aa, synthetic construct [sequence omitted]

SEQ ID NO: 146 - protein, 11 aa, synthetic construct [sequence omitted]

SEQ ID NO: 147 - protein, 11 aa, synthetic construct [sequence omitted]

SEQ ID NO: 148 - protein, 11 aa, synthetic construct [sequence omitted]

SEQ ID NO: 149 - protein, 11 aa, synthetic construct [sequence omitted]

SEQ ID NO: 150 - protein, 11 aa, synthetic construct [sequence omitted]

SEQ ID NO: 151 - protein, 122 aa, synthetic construct
  REGION 1..122: note = Anti-CD33 R69-Selective Full VH
QVQLVQSGAEVKKPGASVKVSCKASGYSFTGYYIHWVRQAPGQGLEWMGWINPNSGGTNYAQKFQGRVTMTRDTSTSTVYMELSSLRSEDTAVYYCARDQWDGYNSGYFDYWGQGTLVTVSS

SEQ ID NO: 152 - protein, 121 aa, synthetic construct
  REGION 1..121: note = Anti-CD33 R69-Selective Full VH
EVQLLESGGGLVQPGGSLRLSCAASGFTFSDYYMSWVRQAPGKGLEWVSGISGSGYSTYYADSVKGRFTISRDNSKNTLYLQMNSLRAEDTAVYYCARTFGRGPDWYFDLWGRGTLVTVSS

SEQ ID NO: 153 - protein, 122 aa, synthetic construct
  REGION 1..122: note = Anti-CD33 R69-Selective Full VH
EVQLLESGGGLVQPGGSLRLSCAASGFTFSNSDMNWVRQAPGKGLEWVSAISGSGGSTYYADSVKGRFTISRDNSKNTLYLQMNSLRAEDTAVYYCARGREDDYGDYVFDYWGQGTLVTVSS

SEQ ID NO: 154 - protein, 116 aa, synthetic construct
  REGION 1..116: note = Anti-CD33 R69-Selective Full VH
QVQLVQSGAEVKKPGASVKVSCKASGGTFSSYAISWVRQAPGQGLEWMGWINPNSGNTGYAQKFQGRVTMTRDTSTSTVYMELSSLRSEDTAVYYCAREHGDMDVWGQGTTVTVSS

SEQ ID NO: 155 - protein, 122 aa, synthetic construct
  REGION 1..122: note = Anti-CD33 R69-Selective Full VH
QVQLVQSGAEVKKPGASVKVSCKASGNTFTSYGISWVRQAPGQGLEWMGWINPNSGGTKYAQKFQGRVTMTRDTSTSTVYMELSSLRSEDTAVYYCARESWFGELYYGMDVWGKGTTVTVSS

SEQ ID NO: 156 - protein, 117 aa, synthetic construct
  REGION 1..117: note = Anti-CD33 R69-Selective Full VH
QVQLVQSGAEVKKPGASVKVSCKASGYTFTAYYTHWVRQAPGQGLEWMGWMNPNSGHTSYAQKFQGRVTMTRDTSTSTVYMELSSLRSEDTAVYYCAREAYDSFDYWGQGTLVTVSS

SEQ ID NO: 157 - protein, 122 aa, synthetic construct
  REGION 1..122: note = Anti-CD33 R69-Selective Full VH
QVQLVQSGAEVKKPGASVKVSCKASGYTFTDYYMHWVRQAPGQGLEWMGWINPNSGGTNYAQKFQGRVTMTRDTSTSTVYMELSSLRSEDTAVYYCARDSRIAVAASSFDYWGQGTLVTVSS

SEQ ID NO: 158 - protein, 118 aa, synthetic construct
  REGION 1..118: note = Anti-CD33 R69-Selective Full VH
EVQLLESGGGLVQPGGSLRLSCAASGFTFSSYAMSWVRQAPGKGLEWVSDISGSGSGTYYADAVKGRFTISRDNSKNTLYLQMNSLRAEDTAVYYCARPGSDGEFDYWGQGTLVTVSS

SEQ ID NO: 159 - protein, 120 aa, synthetic construct
  REGION 1..120: note = Anti-CD33 R69-Selective Full VH
QVQLVQSGAEVKKPGSSVKVSCKASGGTFSSDAINWVRQAPGQGLEWMGGFDPEDGETIYAQKFQGRVTITADESTSTAYMELSSLRSEDTAVYYCARGPSGYDFEFDYWGQGTLVTVSS

SEQ ID NO: 160 - protein, 121 aa, synthetic construct
  REGION 1..121: note = Anti-CD33 R69-Selective Full VH
QVQLVQSGAEVKKPGASVKVSCKASGDTFTTYAISWVRQAPGQGLEWMGWINPNSGVATYANKFQGRVTMTRDTSTSTVYMELSSLRSEDTAVYYCAREGIVGATDAFDIWGQGTMVTVSS

SEQ ID NO: 161 - protein, 122 aa, synthetic construct
  REGION 1..122: note = Anti-CD33 R69-Selective Full VH
QVQLVQSGAEVKKPGASVKVSCKASGDTFTNHYMHWVRQAPGQGLEWMGWINPNSGGTNYAQKFQGRVTMTRDTSTSTVYMELSSLRSEDTAVYYCARDLVPAAVGGYFDYWGQGTLVTVSS

SEQ ID NO: 162 - protein, 118 aa, synthetic construct
  REGION 1..118: note = Anti-CD33 R69-Selective Full VH
EVQLLESGGGLVQPGGSLRLSCAASGFTFSSHWMSWVRQAPGKGLEWVSAISGSGGSTYYADSVKGRFTISRDNSKNTLYLQMNSLRAEDTAVYYCARDDNSGSQADWGQGTLVTVSS

SEQ ID NO: 163 - protein, 122 aa, synthetic construct
  REGION 1..122: note = Anti-CD33 R69-Selective Full VH
QVQLVQSGAEVKKPGASVKVSCKASGYSFTGYYMHWVRQAPGQGLEWMGWINPNSGGTYFAQNFQGRVTMTRDTSTSTVYMELSSLRSEDTAVYYCVKDRGDRVVTSYLDYWGQGTLVTVSS

SEQ ID NO: 164 - protein, 129 aa, synthetic construct
  REGION 1..129: note = Anti-CD33 R69-Selective Full VH
QVQLVQSGAEVKKPGASVKVSCKASGYTFTGYYMHWVRQAPGQGLEWMGIINPSGGSTSYAQKFQGRVTMTRDTSTSTVYMELSSLRSEDTAVYYCARAAPYYYDSSGYYSGGYYFDYWGQGTLVTVSS

SEQ ID NO: 165 - protein, 127 aa, synthetic construct
  REGION 1..127: note = Anti-CD33 R69-Selective Full VH
EVQLLESGGGLVQPGGSLRLSCAASGFTFSIYEIHWVRQAPGKGLEWVSAISGSGGSTYYADSVKGRFTISRDNSKNTLYLQMNSLRAEDTAVYYCARSYCGGDCWDYYYYYGMDVWGQGTTVTVSS

SEQ ID NO: 166 - protein, 121 aa, synthetic construct
  REGION 1..121: note = Anti-CD33 R69-Selective Full VH
EVQLVESGGGLVKPGGSLRLSCAASGFTFSDNSMNWVRQAPGKGLEWVSYISSSGSTIYYADSVKGRFTISRDDSKNTLYLQMNSLKTEDTAVYYCARGRASSWPNWFDPWGQGTLVTVSS

SEQ ID NO: 167 - protein, 116 aa, synthetic construct
  REGION 1..116: note = Anti-CD33 R69-Selective Full VH
EVQLLESGGGLVQPGGSLRLSCAASGFTFSSYAMSWVRQAPGKGLEWVSGISYDSDKIGYADAVKGRFTISRDNSKNTLYLQMNSLRAEDTAVYYCAREWEGFDYWGQGTLVTVSS

SEQ ID NO: 168 - protein, 125 aa, synthetic construct
  REGION 1..125: note = Anti-CD33 R69-Selective Full VH
QVQLVQSGAEVKKPGASVKVSCKASGYTFTDHYMHWVRQAPGQGLEWMGWINPNSGGTNYAQKFQGRVTMTRDTSTSTVYMELSSLRSEDTAVYYCAKDKFGDEGSGWYGDFQHWGQGTLVTVSS

SEQ ID NO: 169 - protein, 115 aa, synthetic construct
  REGION 1..115: note = Anti-CD33 R69-Selective Full VH
EVQLLESGGGLVQPGGSLRLSCAASGFTFSSYWMHWVRQAPGKGLEWVSGFSGSARTYYADSVKGRFTISRDNSKNTLYLQMNSLRAEDTAVYYCAREWSGFDYWGQGTLVTVSS

SEQ ID NO: 170 - protein, 122 aa, synthetic construct
  REGION 1..122: note = Anti-CD33 R69-Selective Full VH
QVQLVQSGAEVKKPGASVKVSCKASGYMFTGYYIHWVRQAPGQGLEWMGWINPNSGGTNYAQKFQGRVTMTRDTSTSTVYMELSSLRSEDTAVYYCAKDRFGSGNYGYMDVWGKGTTVTVSS

SEQ ID NO: 171 - protein, 123 aa, synthetic construct
  REGION 1..123: note = Anti-CD33 R69-Selective Full VH
EVQLLESGGGLVQPGGSLRLSCAASGFTFSSYAMSWVRQAPGKGLEWVSAISGSGGSTYYADSVKGRFTISRDNSKNTLYLQMNSLRAEDTAVYYCARELSHDYGGNSDFDYWGQGTLVTVSS

SEQ ID NO: 172 - protein, 122 aa, synthetic construct
  REGION 1..122: note = Anti-CD33 R69-Selective Full VH
QVQLVQSGAEVKKPGASVKVSCKASGYTFTDYYIHWVRQAPGQGLEWMGWINPNSGGTNYAQEFQGRVTMTRDTSTSTVYMELSSLRSEDTAVYYCARDHRIAVAGSYFDYWGQGTLVTVSS

SEQ ID NO: 173 - protein, 124 aa, synthetic construct
  REGION 1..124: note = Anti-CD33 R69-Selective Full VH
QVQLVQSGAEVKKPGASVKVSCKASGYPFTAHYIHWVRQAPGQGLEWMGWINPNSGGTNYAQKFQGRVTMTRDTSTSTVYMELSSLRSEDTAVYYCARDVEMATIGAYWYFDLWGRGTLVTVSS

SEQ ID NO: 174 - protein, 119 aa, synthetic construct
  REGION 1..119: note = Anti-CD33 R69-Selective Full VH
QVQLVQSGAEVKKPGSSVKVSCKASGYSFTSYGISWVRQAPGQGLEWLGWISAYNGNTNYGQSLQGRVTITADESTSTAYMELSSLRSEDTAVYYCARARGAGTFFDYWGQGTLVTVSS

SEQ ID NO: 175 - protein, 119 aa, synthetic construct
  REGION 1..119: note = Anti-CD33 R69-Selective Full VH
QVQLVQSGAEVKKPGASVKVSCKASGYTFTGYYMHWVRQAPGQGLEWMGRINPNGGSTTYAQKFQGRVTMTRDTSTSTVYMELSSLRSEDTAVYYCARDDFYYYYLDFWGKGTTVTVSS

SEQ ID NO: 176 - protein, 108 aa, synthetic construct
  REGION 1..108: note = Anti-CD33 R69-Selective Full VL
DIQMTQSPSSLSASVGDRVTITCRASQTINDWLAWYQQKPGKAPKLLIYSASTLHSGVPSRFSGSGSGTDFTLTISSLQPEDFATYYCQQAYSTPWTFGQGTKVEIKR

SEQ ID NO: 177 - protein, 108 aa, synthetic construct
  REGION 1..108: note = Anti-CD33 R69-Selective Full VL
DIQMTQSPSSLSASVGDRVTITCRASQSISRYLNWYQQKPGKAPKLLIYTASTLQSGVPSRFSGSGSGTDFTLTISSLQPEDFATYYCQQYDDLPLTFGGGTKVEIKR

SEQ ID NO: 178 - protein, 108 aa, synthetic construct
  REGION 1..108: note = Anti-CD33 R69-Selective Full VL
DIQMTQSPSSLSASVGDRVTITCRASQSISSYLNWYQQKPGKAPKLLIYGASTLHSGVPSRFSGSGSGTDFTLTISSLQPEDFATYYCQQSYRIPYTFGQGTKLEIKR

SEQ ID NO: 179 - protein, 108 aa, synthetic construct
  REGION 1..108: note = Anti-CD33 R69-Selective Full VL
EIVMTQSPATLSVSPGERATLSCRASQNINSDLAWYQQKPGQAPRLLIYGASTRATGIPARFSGSGSGTEFTLTISSLQSEDFAVYYCQQYDSLPFTFGPGTKVDIKR

SEQ ID NO: 180 - protein, 113 aa, synthetic construct
  REGION 1..113: note = Anti-CD33 R69-Selective Full VL
DIVMTQSPLSLPVTPGEPASISCRSSQSLLHSNGYNYLDWYLQKPGQSPQLLIYLGSDRASGVPDRFSGSGSGTDFTLKISRVEAEDVGVYYCMQGLQTPITFGQGTRLEIKR

SEQ ID NO: 181 - protein, 108 aa, synthetic construct
  REGION 1..108: note = Anti-CD33 R69-Selective Full VL
DIQMTQSPSSLSASVGDRVTITCRASQSISSYLNWYQQKPGKAPKLLIYEASTLETGVPSRFSGSGSGTDFTLTISSLQPEDFATYYCQQANSFPFTFGPGTKVDIKR

SEQ ID NO: 182 - protein, 108 aa, synthetic construct
  REGION 1..108: note = Anti-CD33 R69-Selective Full VL
DIQMTQSPSSLSASVGDRVTITCRASRGINNWLTWYQQKPGKAPKLLIYGASSLQSGVPSRFSGSGSGTDFTLTISSLQPEDFATYYCQQSYRIPYTFGQGTKLEIKR

SEQ ID NO: 183 - protein, 108 aa, synthetic construct
  REGION 1..108: note = Anti-CD33 R69-Selective Full VL
DIQMTQSPSSLSASVGDRVTITCRASQSVSSFLNWYQQKPGKAPKLLIYAASSLQSGVPSRFSGSGSGTDFTLTISSLQPEDFATYYCQQSYTTPLTFGQGTKVEIKR

SEQ ID NO: 184 - protein, 108 aa, synthetic construct
  REGION 1..108: note = Anti-CD33 R69-Selective Full VL
DIQMTQSPSSLSASVGDRVTITCRSSRNISHWLAWYQQKPGKAPKLLIYKASSLESGVPSRFSGSGSGTDFTLTISSLQPEDFATYYCQQAISFPLTFGGGTKVEIKR

SEQ ID NO: 185 - protein, 114 aa, synthetic construct
  REGION 1..114: note = Anti-CD33 R69-Selective Full VL
DIVMTQSPDSLAVSLGERATINCKSSQSVLHSSKNKNYLAWYQQKPGQPPKLLIYWASTRESGVPDRFSGSGSGTDFTLTISSLQAEDVAVYYCQQYFTTPPTFGPGTKVDIKR

SEQ ID NO: 186 - protein, 108 aa, synthetic construct
  REGION 1..108: note = Anti-CD33 R69-Selective Full VL
DIQMTQSPSSLSASVGDRVTITCRASQSLGSWLAWYQQKPGKAPKLLIYAASSLQSGVPSRFSGSGSGTDFTLTISSLQPEDFATYYCQQANSFPLTFGQGTKVEIKR

SEQ ID NO: 187 - protein, 108 aa, synthetic construct
  REGION 1..108: note = Anti-CD33 R69-Selective Full VL
DIQMTQSPSSLSASVGDRVTITCQASQDIDNYLNWYQQKPGKAPKLLIYDASNLETGVPSRFSGSGSGTDFTLTISSLQPEDFATYYCQQSYSTPLTFGGGTKLEIKR

SEQ ID NO: 188 - protein, 108 aa, synthetic construct
  REGION 1..108: note = Anti-CD33 R69-Selective Full VL
DIQMTQSPSSLSASVGDRVTITCRASQGIRNWLAWYQQKPGKAPKLLIYAASSLQSGVPSRFSGSGSGTDFTLTISSLQPEDFATYYCQQSYRTPYTFGQGTKLEIKR

SEQ ID NO: 189 - protein, 114 aa, synthetic construct
  REGION 1..114: note = Anti-CD33 R69-Selective Full VL
DIVMTQSPDSLAVSLGERATINCKSSQSVLYSSNNKNYLAWYQQKPGQPPKLLIYWASTRESGVPDRFSGSGSGTDFTLTISSLQAEDVAVYYCQQYYTTPLTFGQGTKLEIKR

SEQ ID NO: 190 - protein, 113 aa, synthetic construct
  REGION 1..113: note = Anti-CD33 R69-Selective Full VL
DIVMTQSPLSLPVTPGEPASISCRSSQSLLHSNGYNYLDWYLQKPGQSPQLLIYLASNRASGVPDRFSGSGSGTDFTLKISRVEAEDVGVYYCKQTSHIPLTFGQGTKVEIKR

SEQ ID NO: 191 - protein, 113 aa, synthetic construct
  REGION 1..113: note = Anti-CD33 R69-Selective Full VL
DIVMTQSPLSLPVTPGEPASISCRSSQSLLHSNGYNYLDWYLQKPGQSPQLLIYSASNLQSGVPDRFSGSGSGTDFTLKISRVEAEDVGVYYCMQALQTPPTFGQGTKLEIKR

SEQ ID NO: 192 - protein, 108 aa, synthetic construct
  REGION 1..108: note = Anti-CD33 R69-Selective Full VL
DIQMTQSPSSLSASVGDRVTITCRASQGISNNLNWYQQKPGKAPKLLIYESSTLETGVPSRFSGSGSGTDFTLTISSLQPEDFATYYCQQSYSAPLTFGGGTKVEIKR

SEQ ID NO: 193 - protein, 113 aa, synthetic construct
  REGION 1..113: note = Anti-CD33 R69-Selective Full VL
DIVMTQSPLSLPVTPGEPASISCRSSQSLLHSNGYNYLDWYLQKPGQSPQLLIYLGSNRASGVPDRFSGSGSGTDFTLKISRVEAEDVGVYYCMQTLRTPLTFGGGTKVEIKR

SEQ ID NO: 194 - protein, 108 aa, synthetic construct
  REGION 1..108: note = Anti-CD33 R69-Selective Full VL
DIQMTQSPSSLSASVGDRVTITCRASQNIGPWLAWYQQKPGKAPKLLIYDAKDLHPGVPSRFSGSGSGTDFTLTISSLQPEDFATYYCQQANTFPMTFGQGTRLEIKR

SEQ ID NO: 195 - protein, 108 aa, synthetic construct
  REGION 1..108: note = Anti-CD33 R69-Selective Full VL
DIQMTQSPSSLSASVGDRVTITCRASQSIDRWLAWYQQKPGKAPKLLIYGASSLQSGVPSRFSGSGSGTDFTLTISSLQPEDFATYYCQQSYSTPWTFGQGTRLEIKR

SEQ ID NO: 196 - protein, 108 aa, synthetic construct
  REGION 1..108: note = Anti-CD33 R69-Selective Full VL
DIQMTQSPSSLSASVGDRVTITCQASQDISNNLNWYQQKPGKAPKLLIYAASGLQSGVPSRFSGSGSGTDFTLTISSLQPEDFATYYCQQANSFPLTFGGGTKVEIKR

SEQ ID NO: 197 - protein, 108 aa, synthetic construct
  REGION 1..108: note = Anti-CD33 R69-Selective Full VL
DIQMTQSPSSLSASVGDRVTITCRASRSIRTWLAWYQQKPGKAPKLLIYAASSLQTGVPSRFSGSGSGTDFTLTISSLQPEDFATYYCQQSYSTPYTFGQGTKLEIKR

SEQ ID NO: 198 - protein, 108 aa, synthetic construct
  REGION 1..108: note = Anti-CD33 R69-Selective Full VL
DIQMTQSPSSLSASVGDRVTITCRASQGINNWLAWYQQKPGKAPKLLIYDASNLETGVPSRFSGSGSGTDFTLTISSLQPEDFATYYCQQANSFPPTFGQGTKLEIKR

SEQ ID NO: 199 - protein, 113 aa, synthetic construct
  REGION 1..113: note = Anti-CD33 R69-Selective Full VL
DIVMTQSPLSLPVTPGEPASISCRSSQSLLHSNGYNYLDWYLQKPGQSPQLLIYDATNLPTGVPDRFSGSGSGTDFTLKISRVEAEDVGVYYCMQALQTPFTFGQGTKLEIKR

SEQ ID NO: 200 - protein, 108 aa, synthetic construct
  REGION 1..108: note = Anti-CD33 R69-Selective Full VL
DIQMTQSPSSLSASVGDRVTITCRASQSINDWLAWYQQKPGKAPKLLIYAASNLQSGVPSRFSGSGSGTDFTLTISSLQPEDFATYYCQQGYSTPPTFGQGTKVEIKR

SEQ ID NO: 201 - protein, 9 aa, synthetic construct
  REGION 1..9: note = Anti-CD33 R69G-Selective HCDR1
YTFTENEMH

SEQ ID NO: 202 - protein, 9 aa, synthetic construct
  REGION 1..9: note = Anti-CD33 R69G-Selective HCDR1
YTLTGYYMH

SEQ ID NO: 203 - protein, 9 aa, synthetic construct
  REGION 1..9: note = Anti-CD33 R69G-Selective HCDR1
FTFSTYAMH

SEQ ID NO: 204 - protein, 9 aa, synthetic construct
  REGION 1..9: note = Anti-CD33 R69G-Selective HCDR1
YTFTGYYLH

SEQ ID NO: 205 - protein, 9 aa, synthetic construct
  REGION 1..9: note = Anti-CD33 R69G-Selective HCDR1
YTFSNYYMH

SEQ ID NO: 206 - protein, 9 aa, synthetic construct
  REGION 1..9: note = Anti-CD33 R69G-Selective HCDR1
GTFSTYAIT

SEQ ID NO: 207 - protein, 9 aa, synthetic construct
  REGION 1..9: note = Anti-CD33 R69G-Selective HCDR1
FTFSSYGMH

SEQ ID NO: 208 - protein, 9 aa, synthetic construct
  REGION 1..9: note = Anti-CD33 R69G-Selective HCDR1
YTFTSYYMH

SEQ ID NO: 209 - protein, 9 aa, synthetic construct
  REGION 1..9: note = Anti-CD33 R69G-Selective HCDR1
YTFTDYYMH

SEQ ID NO: 210 - protein, 9 aa, synthetic construct
  REGION 1..9: note = Anti-CD33 R69G-Selective HCDR1
YTFTDYYMH

SEQ ID NO: 211 - protein, 9 aa, synthetic construct
  REGION 1..9: note = Anti-CD33 R69G-Selective HCDR1
GTFSSYAIS

SEQ ID NO: 212 - protein, 9 aa, synthetic construct
  REGION 1..9: note = Anti-CD33 R69G-Selective HCDR1
YTFTGYYLH

SEQ ID NO: 213 - protein, 9 aa, synthetic construct
  REGION 1..9: note = Anti-CD33 R69G-Selective HCDR1
YSFTSHAIS

SEQ ID NO: 214 - protein, 9 aa, synthetic construct
  REGION 1..9: note = Anti-CD33 R69G-Selective HCDR1
FTFRNYGMG

SEQ ID NO: 215 - protein, 9 aa, synthetic construct
  REGION 1..9: note = Anti-CD33 R69G-Selective HCDR1
YTFTDYHMH

SEQ ID NO: 216 - protein, 9 aa, synthetic construct
  REGION 1..9: note = Anti-CD33 R69G-Selective HCDR1
YTFPNYGIS

SEQ ID NO: 217 - protein, 9 aa, synthetic construct
  REGION 1..9: note = Anti-CD33 R69G-Selective HCDR1
YTFTDYFMH

SEQ ID NO: 218 - protein, 13 aa, synthetic construct
  REGION 1..13: note = Anti-CD33 R69G-Selective HCDR2
GWMNPNSGNTGYA

SEQ ID NO: 219 - protein, 13 aa, synthetic construct
  REGION 1..13: note = Anti-CD33 R69G-Selective HCDR2
GWMNPSSGNTGYA

SEQ ID NO: 220 - protein, 13 aa, synthetic construct
  REGION 1..13: note = Anti-CD33 R69G-Selective HCDR2
SAISGSGGSTYYA

SEQ ID NO: 221 - protein, 13 aa, synthetic construct
  REGION 1..13: note = Anti-CD33 R69G-Selective HCDR2
GVINVRRGSTRYA

SEQ ID NO: 222 - protein, 13 aa, synthetic construct
  REGION 1..13: note = Anti-CD33 R69G-Selective HCDR2
GWMNPDSGTTGYA

SEQ ID NO: 223 - protein, 13 aa, synthetic construct
  REGION 1..13: note = Anti-CD33 R69G-Selective HCDR2
GGIIPIVGRANYA

SEQ ID NO: 224 - protein, 13 aa, synthetic construct
  REGION 1..13: note = Anti-CD33 R69G-Selective HCDR2
SSISGSGDTTYYA

SEQ ID NO: 225 - protein, 13 aa, synthetic construct
  REGION 1..13: note = Anti-CD33 R69G-Selective HCDR2
GIIDPSGGSTNYA

SEQ ID NO: 226 - protein, 13 aa, synthetic construct
  REGION 1..13: note = Anti-CD33 R69G-Selective HCDR2
GIINPSGGSTRYA

SEQ ID NO: 227 - protein, 13 aa, synthetic construct
  REGION 1..13: note = Anti-CD33 R69G-Selective HCDR2
GIINPSGGSTRYA

SEQ ID NO: 228 - protein, 13 aa, synthetic construct
  REGION 1..13: note = Anti-CD33 R69G-Selective HCDR2
GIISPSGRSAGYG

SEQ ID NO: 229 - protein, 13 aa, synthetic construct
  REGION 1..13: note = Anti-CD33 R69G-Selective HCDR2
GVISPSGGGTSYA

SEQ ID NO: 230 - protein, 13 aa, synthetic construct
  REGION 1..13: note = Anti-CD33 R69G-Selective HCDR2
GWIKPNSGDTKYA

SEQ ID NO: 231 - protein, 13 aa, synthetic construct
  REGION 1..13: note = Anti-CD33 R69G-Selective HCDR2
SAISGSGGSTYYA

SEQ ID NO: 232 - protein, 13 aa, synthetic construct
  REGION 1..13: note = Anti-CD33 R69G-Selective HCDR2
GWMSPNSGNTGYA

SEQ ID NO: 233 - protein, 13 aa, synthetic construct
  REGION 1..13: note = Anti-CD33 R69G-Selective HCDR2
GWINPNSGGTKYA

SEQ ID NO: 234 - protein, 13 aa, synthetic construct
  REGION 1..13: note = Anti-CD33 R69G-Selective HCDR2
GWINPNSGNTGYA

SEQ ID NO: 235 - protein, 16 aa, synthetic construct
  REGION 1..16: note = Anti-CD33 R69G-Selective HCDR3
CAREGGDWPYYYMDVW

SEQ ID NO: 236 - protein, 20 aa, synthetic construct
  REGION 1..20: note = Anti-CD33 R69G-Selective HCDR3
CARASSDRYYYDGVWYFDLW

SEQ ID NO: 237 - protein, 14 aa, synthetic construct
  REGION 1..14: note = Anti-CD33 R69G-Selective HCDR3
CARDGYGDYPFDYW

SEQ ID NO: 238 - protein, 12 aa, synthetic construct
  REGION 1..12: note = CARDGYGDYPFDYW
CARVSGSYYQPW

SEQ ID NO: 239 - protein, 15 aa, synthetic construct
  REGION 1..15: note = Anti-CD33 R69G-Selective HCDR3
CVRDGTMVQGIFDYW

SEQ ID NO: 240 - protein, 12 aa, synthetic construct
  REGION 1..12: note = Anti-CD33 R69G-Selective HCDR3
CARSGGHDLDYW

SEQ ID NO: 241 - protein, 17 aa, synthetic construct
  REGION 1..17: note = Anti-CD33 R69G-Selective HCDR3
CARDNPYGDYGGSFDYW

SEQ ID NO: 242 - protein, 17 aa, synthetic construct
  REGION 1..17: note = Anti-CD33 R69G-Selective HCDR3
CARDYYGSGSYYGLDYW

SEQ ID NO: 243 - protein, 15 aa, synthetic construct
  REGION 1..15: note = Anti-CD33 R69G-Selective HCDR3
CARVDGRRWLQSDYW

SEQ ID NO: 244 - protein, 15 aa, synthetic construct
  REGION 1..15: note = Anti-CD33 R69G-Selective HCDR3
CARVDGRRWLRSDYW

SEQ ID NO: 245 - protein, 16 aa, synthetic construct
  REGION 1..16: note = Anti-CD33 R69G-Selective HCDR3
CARTDYGGHKWYFDLW

SEQ ID NO: 246 - protein, 14 aa, synthetic construct
  REGION 1..14: note = Anti-CD33 R69G-Selective HCDR3
CARAGFGEGVFRHW

SEQ ID NO: 247 - protein, 17 aa, synthetic construct
  REGION 1..17: note = Anti-CD33 R69G-Selective HCDR3
CARGSDDYYGSYYFDYW

SEQ ID NO: 248 - protein, 12 aa, synthetic construct
  REGION 1..12: note = Anti-CD33 R69G-Selective HCDR3
CARVKFYGMDVW

SEQ ID NO: 249 - protein, 17 aa, synthetic construct
  REGION 1..17: note = Anti-CD33 R69G-Selective HCDR3
CARADYYGSDYVKFDYW

SEQ ID NO: 250 - protein, 17 aa, synthetic construct
  REGION 1..17: note = Anti-CD33 R69G-Selective HCDR3
CARDRDILTGYYHFDYW

SEQ ID NO: 251 - protein, 19 aa, synthetic construct
  REGION 1..19: note = Anti-CD33 R69G-Selective HCDR3
CARLNDYGDYGGPATLDYW

SEQ ID NO: 252 - protein, 11 aa, synthetic construct
  REGION 1..11: note = Anti-CD33 R69G-Selective LCDR1
QASQDIRNYLN

SEQ ID NO: 253 - protein, 11 aa, synthetic construct
  REGION 1..11: note = Anti-CD33 R69G-Selective LCDR1
RASQDIRNNLG

SEQ ID NO: 254 - protein, 11 aa, synthetic construct
  REGION 1..11: note = Anti-CD33 R69G-Selective LCDR1
RASQGIDNYLA

SEQ ID NO: 255 - protein, 11 aa, synthetic construct
  REGION 1..11: note = Anti-CD33 R69G-Selective LCDR1
RASQSISRWLA

SEQ ID NO: 256 - protein, 11 aa, synthetic construct
  REGION 1..11: note = Anti-CD33 R69G-Selective LCDR1
RASQSISSWLA

SEQ ID NO: 257 - protein, 11 aa, synthetic construct
  REGION 1..11: note = Anti-CD33 R69G-Selective LCDR1
RASQGIGNDLG

SEQ ID NO: 258 - protein, 12 aa, synthetic construct
  REGION 1..12: note = Anti-CD33 R69G-Selective LCDR1
RASQSVSSSYLA

SEQ ID NO: 259 - protein, 11 aa, synthetic construct
  REGION 1..11: note = Anti-CD33 R69G-Selective LCDR1
RASQGISNNLN

SEQ ID NO: 260 - protein, 11 aa, synthetic construct
  REGION 1..11: note = Anti-CD33 R69G-Selective LCDR1
RASQGIRNDLA

SEQ ID NO: 261 - protein, 11 aa, synthetic construct
  REGION 1..11: note = Anti-CD33 R69G-Selective LCDR1
RASQGIRNDLA

SEQ ID NO: 262 - protein, 11 aa, synthetic construct
  REGION 1..11: note = Anti-CD33 R69G-Selective LCDR1
QASQGINNYLN

SEQ ID NO: 263 - protein, 11 aa, synthetic construct
  REGION 1..11: note = Anti-CD33 R69G-Selective LCDR1
RASQSISSYLN

SEQ ID NO: 264 - protein, 11 aa, synthetic construct
  REGION 1..11: note = Anti-CD33 R69G-Selective LCDR1
RASQGISNYLA

SEQ ID NO: 265 - protein, 11 aa, synthetic construct
  REGION 1..11: note = Anti-CD33 R69G-Selective LCDR1
RASQGISNDLA

SEQ ID NO: 266 - protein, 11 aa, synthetic construct
  REGION 1..11: note = Anti-CD33 R69G-Selective LCDR1
RVSQGISSYLN

SEQ ID NO: 267 - protein, 16 aa, synthetic construct
  REGION 1..16: note = Anti-CD33 R69G-Selective LCDR1
RSSQSLLQSNGYNYLD

SEQ ID NO: 268 - protein, 11 aa, synthetic construct
  REGION 1..11: note = Anti-CD33 R69G-Selective LCDR1
RASQGISNNLN

SEQ ID NO: 269 - protein, 7 aa, synthetic construct
  REGION 1..7: note = Anti-CD33 R69G-Selective LCDR2
AASSLQS

SEQ ID NO: 270 - protein, 7 aa, synthetic construct
  REGION 1..7: note = Anti-CD33 R69G-Selective LCDR2
GASSLQS

SEQ ID NO: 271 - protein, 7 aa, synthetic construct
  REGION 1..7: note = Anti-CD33 R69G-Selective LCDR2
QASTLES

SEQ ID NO: 272 - protein, 7 aa, synthetic construct
  REGION 1..7: note = Anti-CD33 R69G-Selective LCDR2
DASNLET

SEQ ID NO: 273 - protein, 7 aa, synthetic construct
  REGION 1..7: note = Anti-CD33 R69G-Selective LCDR2
GASSLQS

SEQ ID NO: 274 - protein, 7 aa, synthetic construct
  REGION 1..7: note = Anti-CD33 R69G-Selective LCDR2
GASSVQS

SEQ ID NO: 275 - protein, 7 aa, synthetic construct
  REGION 1..7: note = Anti-CD33 R69G-Selective LCDR2
ATSTRAT

SEQ ID NO: 276 - protein, 7 aa, synthetic construct
  REGION 1..7: note = Anti-CD33 R69G-Selective LCDR2
DASNLET

SEQ ID NO: 277 - protein, 7 aa, synthetic construct
  REGION 1..7: note = Anti-CD33 R69G-Selective LCDR2
AASTLQN

SEQ ID NO: 278 - protein, 7 aa, synthetic construct
  REGION 1..7: note = Anti-CD33 R69G-Selective LCDR2
AASTLQN

SEQ ID NO: 279 - protein, 7 aa, synthetic construct
  REGION 1..7: note = Anti-CD33 R69G-Selective LCDR2
AASTLQR

SEQ ID NO: 280 - protein, 7 aa, synthetic construct
  REGION 1..7: note = Anti-CD33 R69G-Selective LCDR2
AASSLQS

SEQ ID NO: 281 - protein, 7 aa, synthetic construct
  REGION 1..7: note = Anti-CD33 R69G-Selective LCDR2
TASTLQS

SEQ ID NO: 282 - protein, 7 aa, synthetic construct
  REGION 1..7: note = Anti-CD33 R69G-Selective LCDR2
GASNLET

SEQ ID NO: 283 - protein, 7 aa, synthetic construct
  REGION 1..7: note = Anti-CD33 R69G-Selective LCDR2
EASTLES

SEQ ID NO: 284 - protein, 7 aa, synthetic construct
  REGION 1..7: note = Anti-CD33 R69G-Selective LCDR2
LGSNRAS

SEQ ID NO: 285 - protein, 7 aa, synthetic construct
  REGION 1..7: note = Anti-CD33 R69G-Selective LCDR2
AASSLQS

SEQ ID NO: 286 - protein, 11 aa, synthetic construct [sequence omitted]

SEQ ID NO: 287 - protein, 11 aa, synthetic construct [sequence omitted]

SEQ ID NO: 288 - protein, 11 aa, synthetic construct [sequence omitted]

SEQ ID NO: 289 - protein, 11 aa, synthetic construct
  REGION 1..11: note = Anti-CD33 R69G-Selective LCDR3
CQQGNSFPPIF

SEQ ID NO: 290 - protein, 11 aa, synthetic construct [sequence omitted]

SEQ ID NO: 291 - protein, 11 aa, synthetic construct [sequence omitted]

SEQ ID NO: 292 - protein, 11 aa, synthetic construct [sequence omitted]

SEQ ID NO: 293 - protein, 11 aa, synthetic construct [sequence omitted]

SEQ ID NO: 294 - protein, 11 aa, synthetic construct [sequence omitted]

SEQ ID NO: 295 - protein, 11 aa, synthetic construct [sequence omitted]

SEQ ID NO: 296 - protein, 11 aa, synthetic construct
  REGION 1..11: note = Anti-CD33 R69G-Selective LCDR3
CQQSYQTPLTF

SEQ ID NO: 297 - protein, 11 aa, synthetic construct [sequence omitted]

SEQ ID NO: 298 - protein, 11 aa, synthetic construct [sequence omitted]

SEQ ID NO: 299 - protein, 11 aa, synthetic construct [sequence omitted]

SEQ ID NO: 300 - protein, 11 aa, synthetic construct [sequence omitted]

SEQ ID NO: 301 - protein, 11 aa, synthetic construct [sequence omitted]

SEQ ID NO: 302 - protein, 11 aa, synthetic construct
  REGION 1..11: note = Anti-CD33 R69G-Selective LCDR3
CQQSYSTPPTF

SEQ ID NO: 303 - protein, 121 aa, synthetic construct
  REGION 1..121: note = Anti-CD33 R69G-Selective Full VH
QVQLVQSGAEVKKPGASVKVSCKASGYTFTENEMHWVRQAPGQGLEWMGWMNPNSGNTGYAQKFQGRVTMTRDTSTSTVYMELSSLRSEDTAVYYCAREGGDWPYYYMDVWGKGTTVTVSS

SEQ ID NO: 304 - protein, 125 aa, synthetic construct
  REGION 1..125: note = Anti-CD33 R69G-Selective Full VH
QVQLVQSGAEVKKPGASVKVSCKASGYTLTGYYMHWVRQAPGQGLEWMGWMNPSSGNTGYAQQFQGRVTMTRDTSTSTVYMELSSLRSEDTAVYYCARASSDRYYYDGVWYFDLWGRGTLVTVSS

SEQ ID NO: 305 - protein, 119 aa, synthetic construct
  REGION 1..119: note = Anti-CD33 R69G-Selective Full VH
EVQLLESGGGLVQPGGSLRLSCAASGFTFSTYAMHWVRQAPGKGLEWVSAISGSGGSTYYADSVKGRFTISRDNSKNTLYLQMNSLRAEDTAVYYCARDGYGDYPFDYWGQGTLVTVSS

SEQ ID NO: 306 - protein, 117 aa, synthetic construct
  REGION 1..117: note = Anti-CD33 R69G-Selective Full VH
QVQLVQSGAEVKKPGASVKVSCKASGYTFTGYYLHWVRQAPGQGLEWMGVINVRRGSTRYAQNFQGRVTMTRDTSTSTVYMELSSLRSEDTAVYYCARVSGSYYQPWGQGTLVTVSS

SEQ ID NO: 307 - protein, 120 aa, synthetic construct
  REGION 1..120: note = Anti-CD33 R69G-Selective Full VH
QVQLVQSGAEVKKPGASVKVSCKASGYTFSNYYMHWVRQAPGQGLEWMGWMNPDSGTTGYAQKFQGRVTMTRDTSTSTVYMELSSLRSEDTAVYYCVRDGTMVQGIFDYWGQGTLVTVSS

SEQ ID NO: 308 - protein, 117 aa, synthetic construct
  REGION 1..117: note = Anti-CD33 R69G-Selective Full VH
QVQLVQSGAEVKKPGSSVKVSCKASGGTFSTYAITWVRQAPGQGLEWMGGIIPIVGRANYAQKFQGRVTITADESTSTAYMELSSLRSEDTAVYYCARSGGHDLDYWGQGTLVTVSS

SEQ ID NO: 309 - protein, 122 aa, synthetic construct
  REGION 1..122: note = Anti-CD33 R69G-Selective Full VH
EVQLLESGGGLVQPGGSLRLSCAASGFTFSSYGMHWVRQAPGKGLEWVSSISGSGDTTYYADSVKGRFTISRDNSKNTLYLQMNSLRAEDTAVYYCARDNPYGDYGGSFDYWGQGTLVTVSS

SEQ ID NO: 310 - protein, 122 aa, synthetic construct
  REGION 1..122: note = Anti-CD33 R69G-Selective Full VH
QVQLVQSGAEVKKPGASVKVSCKASGYTFTSYYMHWVRQAPGQGLEWMGIIDPSGGSTNYAQKFQGRVTMTRDTSTSTVYMELSSLRSEDTAVYYCARDYYGSGSYYGLDYWGRGTLVTVSS

SEQ ID NO: 311 - protein, 120 aa, synthetic construct
  REGION 1..120: note = Anti-CD33 R69G-Selective Full VH
QVQLVQSGAEVKKPGASVKVSCKASGYTFTDYYMHWVRQAPGQGLEWMGIINPSGGSTRYAQKFQGRVTMTRDTSTSTVYMELSSLRSEDTAVYYCARVDGRRWLQSDYWGQGTLVTVSS

SEQ ID NO: 312 - protein, 120 aa, synthetic construct
  REGION 1..120: note = Anti-CD33 R69G-Selective Full VH
QVQLVQSGAEVKKPGASVKVSCKASGYTFTDYYMHWVRQAPGQGLEWMGIINPSGGSTRYAQKFQGRVTMTRDTSTSTVYMELSSLRSEDTAVYYCARVDGRRWLRSDYWGQGTLVTVSS

SEQ ID NO: 313 - protein, 121 aa, synthetic construct
  REGION 1..121: note = Anti-CD33 R69G-Selective Full VH
QVQLVQSGAEVKKPGASVKVSCKASGGTFSSYAISWVRQAPGQGLEWLGIISPSGRSAGYGRKFQGRVTMTRDTSTSTVYMELSSLRSEDTAVYYCARTDYGGHKWYFDLWGRGTLVTVSS

SEQ ID NO: 314 - protein, 119 aa, synthetic construct
  REGION 1..119: note = Anti-CD33 R69G-Selective Full VH
QVQLVQSGAEVKKPGASVKVSCKASGYTFTGYYLHWVRQAPGQGLEWMGVISPSGGGTSYAQKFQGRVTMTRDTSTSTVYMELSSLRSEDTAVYYCARAGFGEGVFRHWGQGTLVTVSS

SEQ ID NO: 315 - protein, 122 aa, synthetic construct
  REGION 1..122: note = Anti-CD33 R69G-Selective Full VH
QVQLVQSGAEVKKPGASVKVSCKASGYSFTSHAISWVRQAPGQGLEWMGWIKPNSGDTKYAQKFQGRVTMTRDTSTSTVYMELSSLRSEDTAVYYCARGSDDYYGSYYFDYWGQGTLVTVSS

SEQ ID NO: 316 - protein, 117 aa, synthetic construct
  REGION 1..117: note = Anti-CD33 R69G-Selective Full VH
EVQLLESGGGLVQPGGSLRLSCAASGFTFRNYGMGWVRQAPGKGLEWVSAISGSGGSTYYADSVKGRFTISRDNSKNTLYLQMNSLRAEDTAVYYCARVKFYGMDVWGQGTTVTVSS

SEQ ID NO: 317 - protein, 122 aa, synthetic construct
  REGION 1..122: note = Anti-CD33 R69G-Selective Full VH
QVQLVQSGAEVKKPGASVKVSCKASGYTFTDYHMHWVRQAPGQGLEWMGWMSPNSGNTGYAQNFQGRVTMTRDTSTSTVYMELSSLRSEDTAVYYCARADYYGSDYVKFDYWGQGTLVTVSS

SEQ ID NO: 318 - protein, 122 aa, synthetic construct
  REGION 1..122: note = Anti-CD33 R69G-Selective Full VH
QVQLVQSGAEVKKPGASVKVSCKASGYTFPNYGISWVRQAPGQGLEWMGWINPNSGGTKYAQRFQGRVTMTRDTSTSTVYMELSSLRSEDTAVYYCARDRDILTGYYHFDYWGQGTLVTVSS

SEQ ID NO: 319 - protein, 124 aa, synthetic construct
  REGION 1..124: note = Anti-CD33 R69G-Selective Full VH
QVQLVQSGAEVKKPGASVKVSCKASGYTFTDYFMHWVRQAPGQGLEWMGWINPNSGNTGYAQKFQGRVTMTRDTSTSTVYMELSSLRSEDTAVYYCARLNDYGDYGGPATLDYWGQGTLVTVSS

SEQ ID NO: 320 - protein, 108 aa, synthetic construct
  REGION 1..108: note = Anti-CD33 R69G-Selective Full VL
DIQMTQSPSSLSASVGDRVTITCQASQDIRNYLNWYQQKPGKAPKLLIYAASSLQSGVPSRFSGSGSGTDFTLTISSLQPEDFATYYCQQTSSTPLTFGPGTKVDIKR

SEQ ID NO: 321 - protein, 108 aa, synthetic construct
  REGION 1..108: note = Anti-CD33 R69G-Selective Full VL
DIQMTQSPSSLSASVGDRVTITCRASQDIRNNLGWYQQKPGKAPKLLIYGASSLQSGVPSRFSGSGSGTDFTLTISSLQPEDFATYYCQQTYSSPPTFGQGTKLEIKR

SEQ ID NO: 322 - protein, 108 aa, synthetic construct
  REGION 1..108: note = Anti-CD33 R69G-Selective Full VL
DIQMTQSPSSLSASVGDRVTITCRASQGIDNYLAWYQQKPGKAPKLLIYQASTLESGVPSRFSGSGSGTDFTLTISSLQPEDFATYYCQQSYSIPWTFGQGTKVEIKR

SEQ ID NO: 323 - protein, 108 aa, synthetic construct
  REGION 1..108: note = Anti-CD33 R69G-Selective Full VL
DIQMTQSPSSLSASVGDRVTITCRASQSISRWLAWYQQKPGKAPKLLIYDASNLETGVPSRFSGSGSGTDFTLTISSLQPEDFATYYCQQGNSFPPIFGGGTKVEIKR

SEQ ID NO: 324 - protein, 108 aa, synthetic construct
  REGION 1..108: note = Anti-CD33 R69G-Selective Full VL
DIQMTQSPSSLSASVGDRVTITCRASQSISSWLAWYQQKPGKAPKLLIYGASSLQSGVPSRFSGSGSGTDFTLTISSLQPEDFATYYCQQTYRTPLTFGPGTKVDIKR

SEQ ID NO: 325 - protein, 108 aa, synthetic construct
  REGION 1..108: note = Anti-CD33 R69G-Selective Full VL
DIQMTQSPSSLSASVGDRVTITCRASQGIGNDLGWYQQKPGKAPKLLIYGASSVQSGVPSRFSGSGSGTDFTLTISSLQPEDFATYYCQQSYSTPITFGQGTRLEIKR

SEQ ID NO: 326 - protein, 109 aa, synthetic construct
  REGION 1..109: note = Anti-CD33 R69G-Selective Full VL
EIVMTQSPATLSVSPGERATLSCRASQSVSSSYLAWYQQKPGQAPRLLIYATSTRATGIPARFSGSGSGTEFTLTISSLQSEDFAVYYCQQYGSLPLTFGQGTKVEIKR

SEQ ID NO: 327 - protein, 108 aa, synthetic construct
  REGION 1..108: note = Anti-CD33 R69G-Selective Full VL
DIQMTQSPSSLSASVGDRVTITCRASQGISNNLNWYQQKPGKAPKLLIYDASNLETGVPSRFSGSGSGTDFTLTISSLQPEDFATYYCQQANSFPLTFGPGTKVDIKR

SEQ ID NO: 328 - protein, 108 aa, synthetic construct
  REGION 1..108: note = Anti-CD33 R69G-Selective Full VL
DIQMTQSPSSLSASVGDRVTITCRASQGIRNDLAWYQQKPGKAPKLLIYAASTLQNGVPSRFSGSGSGTDFTLTISSLQPEDFATYYCQQSYSTPWTFGQGTKVEIKR

SEQ ID NO: 329 - protein, 108 aa, synthetic construct; identical to SEQ ID NO: 328
  REGION 1..108: note = Anti-CD33 R69G-Selective Full VL

SEQ ID NO: 330 - protein, 108 aa, synthetic construct
  REGION 1..108: note = Anti-CD33 R69G-Selective Full VL
DIQMTQSPSSLSASVGDRVTITCQASQGINNYLNWYQQKPGKAPKLLIYAASTLQRGVPSRFSGSGSGTDFTLTISSLQPEDFATYYCQQSYQTPLTFGGGTKVEIKR

SEQ ID NO: 331 - protein, 108 aa, synthetic construct
  REGION 1..108: note = Anti-CD33 R69G-Selective Full VL
DIQMTQSPSSLSASVGDRVTITCRASQSISSYLNWYQQKPGKAPKLLIYAASSLQSGVPSRFSGSGSGTDFTLTISSLQPEDFATYYCQQSYSTPLTFGGGTKVEIKR

SEQ ID NO: 332 - protein, 108 aa, synthetic construct
  REGION 1..108: note = Anti-CD33 R69G-Selective Full VL
DIQMTQSPSSLSASVGDRVTITCRASQGISNYLAWYQQKPGKAPKLLIYTASTLQSGVPSRFSGSGSGTDFTLTISSLQPEDFATYYCQQSYSTPLTFGGGTKVEIKR

SEQ ID NO: 333 - protein, 108 aa, synthetic construct
  REGION 1..108: note = Anti-CD33 R69G-Selective Full VL
DIQMTQSPSSLSASVGDRVTITCRASQGISNDLAWYQQKPGKAPKLLIYGASNLETGVPSRFSGSGSGTDFTLTISSLQPEDFATYYCQQANSFPFTFGPGTKVDIKR

SEQ ID NO: 334 - protein, 108 aa, synthetic construct
  REGION 1..108: note = Anti-CD33 R69G-Selective Full VL
DIQMTQSPSSLSASVGDRVTITCRVSQGISSYLNWYQQKPGKAPKLLIYEASTLESGVPSRFSGSGSGTDFTLTISSLQPEDFATYYCQQGYSTPPTFGQGTKVEIKR

SEQ ID NO: 335 - protein, 113 aa, synthetic construct
  REGION 1..113: note = Anti-CD33 R69G-Selective Full VL
DIVMTQSPLSLPVTPGEPASISCRSSQSLLQSNGYNYLDWYLQKPGQSPQLLIYLGSNRASGVPDRFSGSGSGTDFTLKISRVEAEDVGVYYCMQSTHWPLTFGQGTRLEIKR

SEQ ID NO: 336 - protein, 108 aa, synthetic construct
  REGION 1..108: note = Anti-CD33 R69G-Selective Full VL
DIQMTQSPSSLSASVGDRVTITCRASQGISNNLNWYQQKPGKAPKLLIYAASSLQSGVPSRFSGSGSGTDFTLTISSLQPEDFATYYCQQSYSTPPTFGQGTKLEIKR

SEQ ID NO: 337 - protein, 9 aa, synthetic construct
  REGION 1..9: note = Anti-CLL-1 K244 Selective HCDR1
YTFTNYYMH

SEQ ID NO: 338 - protein, 9 aa, synthetic construct
  REGION 1..9: note = Anti-CLL-1 K244 Selective HCDR1
FTFSSYAMH

SEQ ID NO: 339 - protein, 9 aa, synthetic construct
  REGION 1..9: note = Anti-CLL-1 K244 Selective HCDR1
FTFDEFGMN

SEQ ID NO: 340 - protein, 9 aa, synthetic construct
  REGION 1..9: note = Anti-CLL-1 K244 Selective HCDR1
YTFTSYYMH

SEQ ID NO: 341 - protein, 9 aa, synthetic construct
  REGION 1..9: note = Anti-CLL-1 K244 Selective HCDR1
FTFDEYAMH

SEQ ID NO: 342 - protein, 9 aa, synthetic construct
  REGION 1..9: note = Anti-CLL-1 K244 Selective HCDR1
FNFDDYAMH

SEQ ID NO: 343 - protein, 9 aa, synthetic construct
  REGION 1..9: note = Anti-CLL-1 K244 Selective HCDR1
FTFSDYALH

SEQ ID NO: 344 - protein, 9 aa, synthetic construct
  REGION 1..9: note = Anti-CLL-1 K244 Selective HCDR1
YTFTDYYMH

SEQ ID NO: 345 - protein, 9 aa, synthetic construct
  REGION 1..9: note = Anti-CLL-1 K244 Selective HCDR1
GTFSSYAIS

SEQ ID NO: 346 - protein, 9 aa, synthetic construct
  REGION 1..9: note = Anti-CLL-1 K244 Selective HCDR1
DTFTRHYVH

SEQ ID NO: 347 - protein, 9 aa, synthetic construct
  REGION 1..9: note = Anti-CLL-1 K244 Selective HCDR1
GTFSSYAIS

SEQ ID NO: 348 - protein, 9 aa, synthetic construct
  REGION 1..9: note = Anti-CLL-1 K244 Selective HCDR1
GTFSSYAIS

SEQ ID NO: 349 - protein, 9 aa, synthetic construct
  REGION 1..9: note = Anti-CLL-1 K244 Selective HCDR1
YTFTGYHMH

SEQ ID NO: 350 - protein, 9 aa, synthetic construct
  REGION 1..9: note = Anti-CLL-1 K244 Selective HCDR1
YTFTSYDIN

SEQ ID NO: 351 - protein, 9 aa, synthetic construct
  REGION 1..9: note = Anti-CLL-1 K244 Selective HCDR1
YTFNNYGIT

SEQ ID NO: 352 - protein, 9 aa, synthetic construct
  REGION 1..9: note = Anti-CLL-1 K244 Selective HCDR1
YTFTDYYLH

SEQ ID NO: 353 - protein, 9 aa, synthetic construct
  REGION 1..9: note = Anti-CLL-1 K244 Selective HCDR1
FTFSNAWMS

SEQ ID NO: 354 - protein, 9 aa, synthetic construct
  REGION 1..9: note = Anti-CLL-1 K244 Selective HCDR1
GTFSSYAIS

SEQ ID NO: 355 - protein, 9 aa, synthetic construct
  REGION 1..9: note = Anti-CLL-1 K244 Selective HCDR1
YTFTNYYMH

SEQ ID NO: 356 - protein, 9 aa, synthetic construct
  REGION 1..9: note = Anti-CLL-1 K244 Selective HCDR1
YTFTDHFVH

SEQ ID NO: 357 - protein, 9 aa, synthetic construct
  REGION 1..9: note = Anti-CLL-1 K244 Selective HCDR1
YTFTGYYVH

SEQ ID NO: 358 - protein, 9 aa, synthetic construct
  REGION 1..9: note = Anti-CLL-1 K244 Selective HCDR1
YTFTDYYMH

SEQ ID NO: 359 - protein, 9 aa, synthetic construct
  REGION 1..9: note = Anti-CLL-1 K244 Selective HCDR1
YTFTGYYMH

SEQ ID NO: 360 - protein, 9 aa, synthetic construct
  REGION 1..9: note = Anti-CLL-1 K244 Selective HCDR1
YTFNTYYMH

SEQ ID NO: 361 - protein, 13 aa, synthetic construct
  REGION 1..13: note = Anti-CLL-1 K244 Selective HCDR2
GWISPYSGDTKYA

SEQ ID NO: 362 - protein, 13 aa, synthetic construct
  REGION 1..13: note = Anti-CLL-1 K244 Selective HCDR2
ADISGSGGLTYYA

SEQ ID NO: 363 - protein, 13 aa, synthetic construct
  REGION 1..13: note = Anti-CLL-1 K244 Selective HCDR2
SYISGDSGYTNCA

SEQ ID NO: 364 - protein, 13 aa, synthetic construct
  REGION 1..13: note = Anti-CLL-1 K244 Selective HCDR2
GMINPSAGSTSYA

SEQ ID NO: 365 - protein, 12 aa, synthetic construct
  REGION 1..12: note = Anti-CLL-1 K244 Selective HCDR2
SAIGAGGSTYYA

SEQ ID NO: 366 - protein, 12 aa, synthetic construct
  REGION 1..12: note = Anti-CLL-1 K244 Selective HCDR2
SVIYSGGSTYYA

SEQ ID NO: 367 - protein, 13 aa, synthetic construct
  REGION 1..13: note = Anti-CLL-1 K244 Selective HCDR2
SLISGDGGSTYYA

SEQ ID NO: 368 - protein, 13 aa, synthetic construct
  REGION 1..13: note = Anti-CLL-1 K244 Selective HCDR2
GIINPSDGSTTYA

SEQ ID NO: 369 - protein, 13 aa, synthetic construct
  REGION 1..13: note = Anti-CLL-1 K244 Selective HCDR2
GEIIPFFGTANYA

SEQ ID NO: 370 - protein, 12 aa, synthetic construct
  REGION 1..12: note = Anti-CLL-1 K244 Selective HCDR2
GIINPRGGTHYA

SEQ ID NO: 371 - protein, 13 aa, synthetic construct
  REGION 1..13: note = Anti-CLL-1 K244 Selective HCDR2
GWINPDSGDASYA

SEQ ID NO: 372 - protein, 13 aa, synthetic construct
  REGION 1..13: note = Anti-CLL-1 K244 Selective HCDR2
GWIDPKNGDTNYA

SEQ ID NO: 373 - protein, 13 aa, synthetic construct
  REGION 1..13: note = Anti-CLL-1 K244 Selective HCDR2
GWINPNTGGTNYA

SEQ ID NO: 374 - protein, 13 aa, synthetic construct
  REGION 1..13: note = Anti-CLL-1 K244 Selective HCDR2
GWMNPNSGNTGYA

SEQ ID NO: 375 - protein, 13 aa, synthetic construct
  REGION 1..13: note = Anti-CLL-1 K244 Selective HCDR2
GIINPITGVTTYA

SEQ ID NO: 376 - protein, 13 aa, synthetic construct
  REGION 1..13: note = Anti-CLL-1 K244 Selective HCDR2
GWMNPNSGNTGYA

SEQ ID NO: 377 - protein, 13 aa, synthetic construct
  REGION 1..13: note = Anti-CLL-1 K244 Selective HCDR2
ADISYDGTNDYYA

SEQ ID NO: 378 - protein, 13 aa, synthetic construct
  REGION 1..13: note = Anti-CLL-1 K244 Selective HCDR2
GGIIPMFGTANYA

SEQ ID NO: 379 - protein, 13 aa, synthetic construct
  REGION 1..13: note = Anti-CLL-1 K244 Selective HCDR2
GIINPSGGSTSYA

SEQ ID NO: 380 - protein, 13 aa, synthetic construct
  REGION 1..13: note = Anti-CLL-1 K244 Selective HCDR2
GWISAYNGNTNYA

SEQ ID NO: 381 - protein, 14 aa, synthetic construct
  REGION 1..14: note = Anti-CLL-1 K244 Selective HCDR2
GVINPSGGGSPSYA

SEQ ID NO: 382 - protein, 13 aa, synthetic construct
  REGION 1..13: note = Anti-CLL-1 K244 Selective HCDR2
GLIDPSGGSTNSL

SEQ ID NO: 383 - protein, 13 aa, synthetic construct
  REGION 1..13: note = Anti-CLL-1 K244 Selective HCDR2
GWINPNSGGTNYA

SEQ ID NO: 384 - protein, 13 aa, synthetic construct
  REGION 1..13: note = Anti-CLL-1 K244 Selective HCDR2
GWMHPNTGNTGYA

SEQ ID NO: 385 - protein, 12 aa, synthetic construct
  REGION 1..12: note = Anti-CLL-1 K244 Selective HCDR3
CARESMDRLDYW

SEQ ID NO: 386 - protein, 17 aa, synthetic construct
  REGION 1..17: note = Anti-CLL-1 K244 Selective HCDR3
CAREGDQYSSSSFFDYW

SEQ ID NO: 387 - protein, 13 aa, synthetic construct
  REGION 1..13: note = Anti-CLL-1 K244 Selective HCDR3
CAAGYGGYYFDYW

SEQ ID NO: 388 - protein, 16 aa, synthetic construct
  REGION 1..16: note = Anti-CLL-1 K244 Selective HCDR3
CASVDSSGWYAPFDYW

SEQ ID NO: 389 - protein, 22 aa, synthetic construct
  REGION 1..22: note = Anti-CLL-1 K244 Selective HCDR3
CASSLGPELRGVDYYYYGMDVW

SEQ ID NO: 390 - protein, 9 aa, synthetic construct
  REGION 1..9: note = Anti-CLL-1 K244 Selective HCDR3
CTRHDFDYW

SEQ ID NO: 391 - protein, 12 aa, synthetic construct
  REGION 1..12: note = Anti-CLL-1 K244 Selective HCDR3
CARDLGGERSYW

SEQ ID NO: 392 - protein, 19 aa, synthetic construct
  REGION 1..19: note = Anti-CLL-1 K244 Selective HCDR3
CARDELPDSSGWYGYFQHW

SEQ ID NO: 393 - protein, 13 aa, synthetic construct
  REGION 1..13: note = Anti-CLL-1 K244 Selective HCDR3
CARAEYGGDLDYW

SEQ ID NO: 394 - protein, 18 aa, synthetic construct
  REGION 1..18: note = Anti-CLL-1 K244 Selective HCDR3
CARRDCSGGSCYSDLDYW

SEQ ID NO: 395 - protein, 12 aa, synthetic construct
  REGION 1..12: note = Anti-CLL-1 K244 Selective HCDR3
CATFGEEAFDIW

SEQ ID NO: 396 - protein, 18 aa, synthetic construct
  REGION 1..18: note = Anti-CLL-1 K244 Selective HCDR3
CATEGSHHPYYYYGMDVW

SEQ ID NO: 397 - protein, 21 aa, synthetic construct
  REGION 1..21: note = Anti-CLL-1 K244 Selective HCDR3
CARPNTAMVPPYYYYYGMDVW

SEQ ID NO: 398 - protein, 15 aa, synthetic construct
  REGION 1..15: note = Anti-CLL-1 K244 Selective HCDR3
CARVSATGTYGLDYW

SEQ ID NO: 399 - protein, 14 aa, synthetic construct
  REGION 1..14: note = Anti-CLL-1 K244 Selective HCDR3
CASGEQQLVLFDYW

SEQ ID NO: 400 - protein, 14 aa, synthetic construct
  REGION 1..14: note = Anti-CLL-1 K244 Selective HCDR3
CAADVITAYGMDVW

SEQ ID NO: 401 - protein, 14 aa, synthetic construct
  REGION 1..14: note = Anti-CLL-1 K244 Selective HCDR3
CTTEELRFGGFDYW

SEQ ID NO: 402 - protein, 17 aa, synthetic construct
  REGION 1..17: note = Anti-CLL-1 K244 Selective HCDR3
CARDLGYSNAGGTLHYW

SEQ ID NO: 403 - protein, 17 aa, synthetic construct
  REGION 1..17: note = Anti-CLL-1 K244 Selective HCDR3
CARAEWDILTGYYIDYW

SEQ ID NO: 404 - protein, 13 aa, synthetic construct
  REGION 1..13: note = Anti-CLL-1 K244 Selective HCDR3
CARAEYSYGFDYW

SEQ ID NO: 405 - protein, 15 aa, synthetic construct
  REGION 1..15: note = Anti-CLL-1 K244 Selective HCDR3
CARDRSDVDYGMDVW

SEQ ID NO: 406 - protein, 15 aa, synthetic construct
  REGION 1..15: note = Anti-CLL-1 K244 Selective HCDR3
CARDVGFGELSFDIW

SEQ ID NO: 407 - protein, 19 aa, synthetic construct
  REGION 1..19: note = Anti-CLL-1 K244 Selective HCDR3
CAREIGGYDNYYYYGMDVW

SEQ ID NO: 408 - protein, 13 aa, synthetic construct
  REGION 1..13: note = Anti-CLL-1 K244 Selective HCDR3
CARGTTSDAFDIW

SEQ ID NO: 409 - protein, 11 aa, synthetic construct
  REGION 1..11: note = Anti-CLL-1 K244 Selective LCDR1
RASQSISTYLN

SEQ ID NO: 410 - protein, 16 aa, synthetic construct
  REGION 1..16: note = Anti-CLL-1 K244 Selective LCDR1
RSSQSLLHSNGYNYLD

SEQ ID NO: 411 - protein, 11 aa, synthetic construct
  REGION 1..11: note = Anti-CLL-1 K244 Selective LCDR1
QASQDIDIYLN

SEQ ID NO: 412 - protein, 11 aa, synthetic construct
  REGION 1..11: note = Anti-CLL-1 K244 Selective LCDR1
RASQSISTYLN

SEQ ID NO: 413 - protein, 16 aa, synthetic construct
  REGION 1..16: note = Anti-CLL-1 K244 Selective LCDR1
RSSQSLLHSNGYNYLD

SEQ ID NO: 414 - protein, 11 aa, synthetic construct
  REGION 1..11: note = Anti-CLL-1 K244 Selective LCDR1
RASQSISTYVN

SEQ ID NO: 415 - protein, 11 aa, synthetic construct
  REGION 1..11: note = Anti-CLL-1 K244 Selective LCDR1
RASQSISTWLA

SEQ ID NO: 416 - protein, 11 aa, synthetic construct
  REGION 1..11: note = Anti-CLL-1 K244 Selective LCDR1
RASQSISSWLA

SEQ ID NO: 417 - protein, 11 aa, synthetic construct
  REGION 1..11: note = Anti-CLL-1 K244 Selective LCDR1
QASQDISNLLN

SEQ ID NO: 418 - protein, 11 aa, synthetic construct
  REGION 1..11: note = Anti-CLL-1 K244 Selective LCDR1
QASQDIHNYLN

SEQ ID NO: 419 - protein, 11 aa, synthetic construct
  REGION 1..11: note = Anti-CLL-1 K244 Selective LCDR1
RASQNIGSWLA

SEQ ID NO: 420 - protein, 11 aa, synthetic construct
  REGION 1..11: note = Anti-CLL-1 K244 Selective LCDR1
RASQGIGNWLA

SEQ ID NO: 421 - protein, 11 aa, synthetic construct
  REGION 1..11: note = Anti-CLL-1 K244 Selective LCDR1
QASQDISNYLN

SEQ ID NO: 422 - protein, 11 aa, synthetic construct
  REGION 1..11: note = Anti-CLL-1 K244 Selective LCDR1
RASHSISSWLA

SEQ ID NO: 423 - protein, 11 aa, synthetic construct
  REGION 1..11: note = Anti-CLL-1 K244 Selective LCDR1
QASQDINDYLN

SEQ ID NO: 424 - protein, 11 aa, synthetic construct
  REGION 1..11: note = Anti-CLL-1 K244 Selective LCDR1
RASQGISNYLA

SEQ ID NO: 425 - protein, 11 aa, synthetic construct
  REGION 1..11: note = Anti-CLL-1 K244 Selective LCDR1
RASQSISSYLN

SEQ ID NO: 426 - protein, 11 aa, synthetic construct
  REGION 1..11: note = Anti-CLL-1 K244 Selective LCDR1
RASQSIGTYLA

SEQ ID NO: 427 - protein, 11 aa, synthetic construct
  REGION 1..11: note = Anti-CLL-1 K244 Selective LCDR1
QASQDISNYLN

SEQ ID NO: 428 - protein, 11 aa, synthetic construct
  REGION 1..11: note = Anti-CLL-1 K244 Selective LCDR1
RASQGIHNYLA

SEQ ID NO: 429 - protein, 11 aa, synthetic construct
  REGION 1..11: note = Anti-CLL-1 K244 Selective LCDR1
QASQDISNYLN

SEQ ID NO: 430 - protein, 16 aa, synthetic construct
  REGION 1..16: note = Anti-CLL-1 K244 Selective LCDR1
RSSQSLLHSNGYNYLD

SEQ ID NO: 431 - protein, 11 aa, synthetic construct
  REGION 1..11: note = Anti-CLL-1 K244 Selective LCDR1
RASQSIGTYLN

SEQ ID NO: 432 - protein, 11 aa, synthetic construct
  REGION 1..11: note = Anti-CLL-1 K244 Selective LCDR1
RASQSIFSYLN

SEQ ID NO: 433 - protein, 7 aa, synthetic construct
  REGION 1..7: note = Anti-CLL-1 K244 Selective LCDR2
DASNLET

SEQ ID NO: 434 - protein, 7 aa, synthetic construct
  REGION 1..7: note = Anti-CLL-1 K244 Selective LCDR2
LGSNRAS

SEQ ID NO: 435 - protein, 7 aa, synthetic construct
  REGION 1..7: note = Anti-CLL-1 K244 Selective LCDR2
AASTLES

SEQ ID NO: 436 - protein, 7 aa, synthetic construct
  REGION 1..7: note = Anti-CLL-1 K244 Selective LCDR2
DASNLET

SEQ ID NO: 437 - protein, 7 aa, synthetic construct
  REGION 1..7: note = Anti-CLL-1 K244 Selective LCDR2
AASSLQS

SEQ ID NO: 438 - protein, 7 aa, synthetic construct
  REGION 1..7: note = Anti-CLL-1 K244 Selective LCDR2
AASSLQS

SEQ ID NO: 439 - protein, 7 aa, synthetic construct
  REGION 1..7: note = Anti-CLL-1 K244 Selective LCDR2
AASTLQS

SEQ ID NO: 440 - protein, 7 aa, synthetic construct
  REGION 1..7: note = Anti-CLL-1 K244 Selective LCDR2
AASSLQS

SEQ ID NO: 441 - protein, 7 aa, synthetic construct
  REGION 1..7: note = Anti-CLL-1 K244 Selective LCDR2
AASTLQS

SEQ ID NO: 442 - protein, 7 aa, synthetic construct
  REGION 1..7: note = Anti-CLL-1 K244 Selective LCDR2
QASSLES

SEQ ID NO: 443 - protein, 7 aa, synthetic construct
  REGION 1..7: note = Anti-CLL-1 K244 Selective LCDR2
GASILQS

SEQ ID NO: 444 - protein, 7 aa, synthetic construct
  REGION 1..7: note = Anti-CLL-1 K244 Selective LCDR2
EASTLQS

SEQ ID NO: 445 - protein, 7 aa, synthetic construct
  REGION 1..7: note = Anti-CLL-1 K244 Selective LCDR2
AASSLQS

SEQ ID NO: 446 - protein, 7 aa, synthetic construct
  REGION 1..7: note = Anti-CLL-1 K244 Selective LCDR2
DASNLET

SEQ ID NO: 447 - protein, 7 aa, synthetic construct
  REGION 1..7: note = Anti-CLL-1 K244 Selective LCDR2
GASNLQS

SEQ ID NO: 448 - protein, 7 aa, synthetic construct
  REGION 1..7: note = Anti-CLL-1 K244 Selective LCDR2
DASNLET

SEQ ID NO: 449 - protein, 7 aa, synthetic construct
  REGION 1..7: note = Anti-CLL-1 K244 Selective LCDR2
DASNLET

SEQ ID NO: 450 - protein, 7 aa, synthetic construct
  REGION 1..7: note = Anti-CLL-1 K244 Selective LCDR2
DASSRAT

SEQ ID NO: 451 - protein, 7 aa, synthetic construct
  REGION 1..7: note = Anti-CLL-1 K244 Selective LCDR2
GASSLQS

SEQ ID NO: 452 - protein, 7 aa, synthetic construct
  REGION 1..7: note = Anti-CLL-1 K244 Selective LCDR2
DASNLET

SEQ ID NO: 453 - protein, 7 aa, synthetic construct
  REGION 1..7: note = Anti-CLL-1 K244 Selective LCDR2
DASNLQS

SEQ ID NO: 454 - protein, 7 aa, synthetic construct
  REGION 1..7: note = Anti-CLL-1 K244 Selective LCDR2
AASTLQS

SEQ ID NO: 455 - protein, 7 aa, synthetic construct
  REGION 1..7: note = Anti-CLL-1 K244 Selective LCDR2
AASSLQS

SEQ ID NO: 456 - protein, 7 aa, synthetic construct
  REGION 1..7: note = Anti-CLL-1 K244 Selective LCDR2
SASNLQS

SEQ ID NO: 457 - protein, 12 aa, synthetic construct [sequence omitted]

SEQ ID NO: 458 - protein, 11 aa, synthetic construct [sequence omitted]

SEQ ID NO: 459 - protein, 11 aa, synthetic construct
  REGION 1..11: note = Anti-CLL-1 K244 Selective LCDR3
CQQSYSTPPTF

SEQ ID NO: 460 - protein, 11 aa, synthetic construct [sequence omitted]

SEQ ID NO: 461 - protein, 11 aa, synthetic construct
  REGION 1..11: note = Anti-CLL-1 K244 Selective LCDR3
CMQGIQWPWTF

SEQ ID NO: 462 - protein, 11 aa, synthetic construct [sequence omitted]

SEQ ID NO: 463 - protein, 11 aa, synthetic construct [sequence omitted]

SEQ ID NO: 464 - protein, 11 aa, synthetic construct [sequence omitted]

SEQ ID NO: 465 - protein, 11 aa, synthetic construct [sequence omitted]

SEQ ID NO: 466 - protein, 11 aa, synthetic construct [sequence omitted]

SEQ ID NO: 467 - protein, 11 aa, synthetic construct [sequence omitted]

SEQ ID NO: 468 - protein, 11 aa, synthetic construct
  REGION 1..11: note = Anti-CLL-1 K244 Selective LCDR3
CHQYNAYPWTF

SEQ ID NO: 469 - protein, 11 aa, synthetic construct [sequence omitted]

SEQ ID NO: 470 - protein, 11 aa, synthetic construct [sequence omitted]

SEQ ID NO: 471 - protein, 11 aa, synthetic construct [sequence omitted]

SEQ ID NO: 472 - protein, 11 aa, synthetic construct [sequence omitted]

SEQ ID NO: 473 - protein, 11 aa, synthetic construct [sequence omitted]

SEQ ID NO: 474 - protein, 11 aa, synthetic construct [sequence omitted]

SEQ ID NO: 475 - protein, 11 aa, synthetic construct [sequence omitted]

SEQ ID NO: 476 - protein, 11 aa, synthetic construct [sequence omitted]

SEQ ID NO: 477 - protein, 11 aa, synthetic construct [sequence omitted]

SEQ ID NO: 478 - protein, 11 aa, synthetic construct [sequence omitted]

SEQ ID NO: 479 - protein, 11 aa, synthetic construct
  REGION 1..11: note = Anti-CLL-1 K244 Selective LCDR3
CQQSYTDPWTF

SEQ ID NO: 480 - protein, 11 aa, synthetic construct [sequence omitted]

SEQ ID NO: 481 - protein, 117 aa, synthetic construct
  REGION 1..117: note = Anti-CLL-1 K244 Selective Full VH
QVQLVQSGAEVKKPGASVKVSCKASGYTFTNYYMHWVRQAPGQGLEWLGWISPYSGDTKYAQTLQGRVTMTRDTSTSTVYMELSSLRSEDTAVYYCARESMDRLDYWGQGTLVTVSS

SEQ ID NO: 482 - protein, 122 aa, synthetic construct
  REGION 1..122: note = Anti-CLL-1 K244 Selective Full VH
EVQLLESGGGLVQPGGSLRLSCAASGFTFSSYAMHWVRQAPGKGLEWVADISGSGGLTYYADSVKGRFTISRDNSKNTLYLQMNSLRAEDTAVYYCAREGDQYSSSSFFDYWGQGTLVTVSS

SEQ ID NO: 483 - protein, 118 aa, synthetic construct
  REGION 1..118: note = Anti-CLL-1 K244 Selective Full VH
EVQLVESGGGLVKPGGSLRLSCAASGFTFDEFGMNWVRQAPGKGLEWISYISGDSGYTNCADSVKGRFTISRDDSKNTLYLQMNSLKTEDTAVYYCAAGYGGYYFDYWGQGTLVTVSS

SEQ ID NO: 484 - protein, 121 aa, synthetic construct
  REGION 1..121: note = Anti-CLL-1 K244 Selective Full VH
QVQLVQSGAEVKKPGASVKVSCKASGYTFTSYYMHWVRQAPGQGLEWMGMINPSAGSTSYAQKFQGRVTMTRDTSTSTVYMELSSLRSEDTAVYYCASVDSSGWYAPFDYWGQGTLVTVSS

SEQ ID NO: 485 - protein, 126 aa, synthetic construct
  REGION 1..126: note = Anti-CLL-1 K244 Selective Full VH
EVQLLESGGGLVQPGGSLRLSCAASGFTFDEYAMHWVRQAPGKGLEWVSAIGAGGSTYYADSVKGRFTISRDNSKNTLYLQMNSLRAEDTAVYYCASSLGPELRGVDYYYYGMDVWGQGTTVTVSS

SEQ ID NO: 486 - protein, 113 aa, synthetic construct
  REGION 1..113: note = Anti-CLL-1 K244 Selective Full VH
EVQLLESGGGLVQPGGSLRLSCAASGFNFDDYAMHWVRQAPGKGLEWVSVIYSGGSTYYADSVKGRFTISRDNSKNTLYLQMNSLRAEDTAVYYCTRHDFDYWGQGTLVTVSS

SEQ ID NO: 487 - protein, 117 aa, synthetic construct
  REGION 1..117: note = Anti-CLL-1 K244 Selective Full VH
EVQLVESGGGLVKPGGSLRLSCAASGFTFSDYALHWVRQAPGKGLEWVSLISGDGGSTYYADSVKGRFTISRDDSKNTLYLQMNSLKTEDTAVYYCARDLGGERSYWGQGTLVTVSS

SEQ ID NO: 488 - protein, 124 aa, synthetic construct
  REGION 1..124: note = Anti-CLL-1 K244 Selective Full VH
QVQLVQSGAEVKKPGASVKVSCKASGYTFTDYYMHWVRQAPGQGLEWMGIINPSDGSTTYAQSFQGRVTMTRDTSTSTVYMELSSLRSEDTAVYYCARDELPDSSGWYGYFQHWGQGTLVTVSS

SEQ ID NO: 489 - protein, 118 aa, synthetic construct
  REGION 1..118: note = Anti-CLL-1 K244 Selective Full VH
QVQLVQSGAEVKKPGSSVKVSCKASGGTFSSYAISWVRQAPGQGLEWMGEIIPFFGTANYAQKFQGRVTITADESTSTAYMELSSLRSEDTAVYYCARAEYGGDLDYWGQGTLVTVSS

SEQ ID NO: 490 - protein, 122 aa, synthetic construct
  REGION 1..122: note = Anti-CLL-1 K244 Selective Full VH
QVQLVQSGAEVKKPGASVKVSCKASGDTFTRHYVHWVRQAPGQGLEWMGIINPRGGTHYAQKFQGRVTMTRDTSTSTVYMELSSLRSEDTAVYYCARRDCSGGSCYSDLDYWGQGTLVTVSS

SEQ ID NO: 491 - protein, 117 aa, synthetic construct
  REGION 1..117: note = Anti-CLL-1 K244 Selective Full VH
QVQLVQSGAEVKKPGASVKVSCKASGGTFSSYAISWVRQAPGQGLEWMGWINPDSGDASYARKFQGRVTMTRDTSTSTVYMELSSLRSEDTAVYYCATFGEEAFDIWGQGTMVTVSS

SEQ ID NO: 492 - protein, 123 aa, synthetic construct
  REGION 1..123: note = Anti-CLL-1 K244 Selective Full VH
QVQLVQSGAEVKKPGASVKVSCKASGGTFSSYAISWVRQAPGQGLEWMGWIDPKNGDTNYAQKFQGRVTMTRDTSTSTVYMELSSLRSEDTAVYYCATEGSHHPYYYYGMDVWGQGTTVTVSS

SEQ ID NO: 493 - protein, 126 aa, synthetic construct
  REGION 1..126: note = Anti-CLL-1 K244 Selective Full VH
QVQLVQSGAEVKKPGASVKVSCKASGYTFTGYHMHWVRQAPGQGLEWMGWINPNTGGTNYAQKFQGRVTMTRDTSTSTVYMELSSLRSEDTAVYYCARPNTAMVPPYYYYYGMDVWGQGTLVTVSS

SEQ ID NO: 494 - protein, 120 aa, synthetic construct
  REGION 1..120: note = Anti-CLL-1 K244 Selective Full VH
QVQLVQSGAEVKKPGASVKVSCKASGYTFTSYDINWVRQAPGQGLEWMGWMNPNSGNTGYAQKFQGRVTMTRDTSTSTVYMELSSLRSEDTAVYYCARVSATGTYGLDYWGQGTLVTVSS

SEQ ID NO: 495 - protein, 119 aa, synthetic construct
  REGION 1..119: note = Anti-CLL-1 K244 Selective Full VH
QVQLVQSGAEVKKPGASVKVSCKASGYTFNNYGITWVRQAPGQGLEWMGIINPITGVTTYAQNFQGRVTMTRDTSTSTVYMELSSLRSEDTAVYYCASGEQQLVLFDYWGQGTLVTVSS

SEQ ID NO: 496 - protein, 119 aa, synthetic construct
  REGION 1..119: note = Anti-CLL-1 K244 Selective Full VH
QVQLVQSGAEVKKPGASVKVSCKASGYTFTDYYLHWVRQAPGQGLEWMGWMNPNSGNTGYAQKFQGRVTMTRDTSTSTVYMELSSLRSEDTAVYYCAADVITAYGMDVWGQGTMVTVSS

SEQ ID NO: 497 - protein, 119 aa, synthetic construct
  REGION 1..119: note = Anti-CLL-1 K244 Selective Full VH
EVQLLESGGGLVQPGGSLRLSCAASGFTFSNAWMSWVRQAPGKGLEWVADISYDGTNDYYADSVKGRFTISRDNSKNTLYLQMNSLRAEDTAVYYCTTEELRFGGFDYWGQGTLVTVSS

SEQ ID NO: 498 - protein, 122 aa, synthetic construct
  REGION 1..122: note = Anti-CLL-1 K244 Selective Full VH
QVQLVQSGAEVKKPGSSVKVSCKASGGTFSSYAISWVRQAPGQGLEWMGGIIPMFGTANYAQKFQGRVTITADESTSTAYMELSSLRSEDTAVYYCARDLGYSNAGGTLHYWGQGTLVTVSS

SEQ ID NO: 499 - protein, 122 aa, synthetic construct
  REGION 1..122: note = Anti-CLL-1 K244 Selective Full VH
QVQLVQSGAEVKKPGASVKVSCKASGYTFTNYYMHWVRQAPGQGLEWMGIINPSGGSTSYAQKFQGRVTMTRDTSTSTVYMELSSLRSEDTAVYYCARAEWDILTGYYIDYWGQGTLVTVSS

SEQ ID NO: 500 - protein, 118 aa, synthetic construct
  REGION 1..118: note = Anti-CLL-1 K244 Selective Full VH
QVQLVQSGAEVKKPGASVKVSCKASGYTFTDHFVHWVRQAPGQGLEWMGWISAYNGNTNYAQKFQGRVTMTRDTSTSTVYMELSSLRSEDTAVYYCARAEYSYGFDYWGQGTLVTVSS

SEQ ID NO: 501 - protein, 121 aa, synthetic construct
  REGION 1..121: note = Anti-CLL-1 K244 Selective Full VH
QVQLVQSGAEVKKPGASVKVSCKASGYTFTGYYVHWVRQAPGQGLEWMGVINPSGGGSPSYAQKFQGRVTMTRDTSTSTVYMELSSLRSEDTAVYYCARDRSDVDYGMDVWGQGTTVTVSS

SEQ ID NO: 502 - protein, 120 aa, synthetic construct
  REGION 1..120: note = Anti-CLL-1 K244 Selective Full VH
QVQLVQSGAEVKKPGASVKVSCKASGYTFTDYYMHWVRQAPGQGLEWMGLIDPSGGSTNSLQKFQGRVTMTRDTSTSTVYMELSSLRSEDTAVYYCARDVGFGELSFDIWGQGTTVTVSS

SEQ ID NO: 503 - protein, 124 aa, synthetic construct
  REGION 1..124: note = Anti-CLL-1 K244 Selective Full VH
QVQLVQSGAEVKKPGASVKVSCKASGYTFTGYYMHWVRQAPGQGLEWMGWINPNSGGTNYAQKFQGRVTMTRDTSTSTVYMELSSLRSEDTAVYYCAREIGGYDNYYYYGMDVWGQGTTVTVSS

SEQ ID NO: 504 - protein, 118 aa, synthetic construct
  REGION 1..118: note = Anti-CLL-1 K244 Selective Full VH
QVQLVQSGAEVKKPGASVKVSCKASGYTFNTYYMHWVRQAPGQGLEWMGWMHPNTGNTGYAQKFQGRVTMTRDTSTSTVYMELSSLRSEDTAVYYCARGTTSDAFDIWGQGTMVTVSS

SEQ ID NO: 505 - protein, 109 aa, synthetic construct
  REGION 1..109: note = Anti-CLL-1 K244 Selective Full VL
DIQMTQSPSSLSASVGDRVTITCRASQSISTYLNWYQQKPGKAPKLLIYDASNLETGVPSRFSGSGSGTDFTLTISSLQPEDFATYYCQQSYSTPVLTFGGGTKVEIKR

SEQ ID NO: 506 - protein, 113 aa, synthetic construct
  REGION 1..113: note = Anti-CLL-1 K244 Selective Full VL
DIVMTQSPLSLPVTPGEPASISCRSSQSLLHSNGYNYLDWYLQKPGQSPQLLIYLGSNRASGVPDRFSGSGSGTDFTLKISRVEAEDVGVYYCMQALQPPPTFGQGTRLEIKR

SEQ ID NO: 507 - protein, 108 aa, synthetic construct
  REGION 1..108: note = Anti-CLL-1 K244 Selective Full VL
DIQMTQSPSSLSASVGDRVTITCQASQDIDIYLNWYQQKPGKAPKLLIYAASTLESGVPSRFSGSGSGTDFTLTISSLQPEDFATYYCQQSYSTPPTFGGGTKVEIKR

SEQ ID NO: 508 - protein, 108 aa, synthetic construct
  REGION 1..108: note = Anti-CLL-1 K244 Selective Full VL
DIQMTQSPSSLSASVGDRVTITCRASQSISTYLNWYQQKPGKAPKLLIYDASNLETGVPSRFSGSGSGTDFTLTISSLQPEDFATYYCQQANSFPPTFGGGTKVEIKR

SEQ ID NO: 509 - protein, 113 aa, synthetic construct
  REGION 1..113: note = Anti-CLL-1 K244 Selective Full VL
DIVMTQSPLSLPVTPGEPASISCRSSQSLLHSNGYNYLDWYLQKPGQSPQLLIYAASSLQSGVPDRFSGSGSGTDFTLKISRVEAEDVGVYYCMQGIQWPWTFGQGTKVEIKR

SEQ ID NO: 510 - protein, 108 aa, synthetic construct
  REGION 1..108: note = Anti-CLL-1 K244 Selective Full VL
DIQMTQSPSSLSASVGDRVTITCRASQSISTYVNWYQQKPGKAPKLLIYAASSLQSGVPSRFSGSGSGTDFTLTISSLQPEDFATYYCQQDYSYPYTFGQGTKVEIKR

SEQ ID NO: 511 - protein, 108 aa, synthetic construct
  REGION 1..108: note = Anti-CLL-1 K244 Selective Full VL
DIQMTQSPSSLSASVGDRVTITCRASQSISTWLAWYQQKPGKAPKLLIYAASTLQSGVPSRFSGSGSGTDFTLTISSLQPEDFATYYCLQDYSYPPTFGQGTKVEIKR

SEQ ID NO: 512 - protein, 108 aa, synthetic construct
  REGION 1..108: note = Anti-CLL-1 K244 Selective Full VL
DIQMTQSPSSLSASVGDRVTITCRASQSISSWLAWYQQKPGKAPKLLIYAASSLQSGVPSRFSGSGSGTDFTLTISSLQPEDFATYYCQQSYDIPLTFGGGTKVEIKR

SEQ ID NO: 513 - protein, 108 aa, synthetic construct
  REGION 1..108: note = Anti-CLL-1 K244 Selective Full VL
DIQMTQSPSSLSASVGDRVTITCQASQDISNLLNWYQQKPGKAPKLLIYAASTLQSGVPSRFSGSGSGTDFTLTISSLQPEDFATYYCQQSYNTPWTFGPGTKVDIKR

SEQ ID NO: 514 - protein, 108 aa, synthetic construct
  REGION 1..108: note = Anti-CLL-1 K244 Selective Full VL
DIQMTQSPSSLSASVGDRVTITCQASQDIHNYLNWYQQKPGKAPKLLIYQASSLESGVPSRFSGSGSGTDFTLTISSLQPEDFATYYCQQANSFPLTFGGGTKLEIKR

SEQ ID NO: 515 - protein, 108 aa, synthetic construct
  REGION 1..108: note = Anti-CLL-1 K244 Selective Full VL
DIQMTQSPSSLSASVGDRVTITCRASQNIGSWLAWYQQKPGKAPKLLIYGASILQSGVPSRFSGSGSGTDFTLTISSLQPEDFATYYCQQANSFPLTFGGGTKLEIKR

SEQ ID NO: 516 - protein, 108 aa, synthetic construct
  REGION 1..108: note = Anti-CLL-1 K244 Selective Full VL
DIQMTQSPSSLSASVGDRVTITCRASQGIGNWLAWYQQKPGKAPKLLIYEASTLQSGVPSRFSGSGSGTDFTLTISSLQPEDFATYYCHQYNAYPWTFGQGTKVEIKR

SEQ ID NO: 517 - protein, 108 aa, synthetic construct
  REGION 1..108: note = Anti-CLL-1 K244 Selective Full VL
DIQMTQSPSSLSASVGDRVTITCQASQDISNYLNWYQQKPGKAPKLLIYAASSLQSGVPSRFSGSGSGTDFTLTISSLQPEDFATYYCQQYNSYPLTFGQGTKLEIKR

SEQ ID NO: 518 - protein, 108 aa, synthetic construct
  REGION 1..108: note = Anti-CLL-1 K244 Selective Full VL
DIQMTQSPSSLSASVGDRVTITCRASHSISSWLAWYQQKPGKAPKLLIYDASNLETGVPSRFSGSGSGTDFTLTISSLQPEDFATYYCQQADSFPLTFGGGTKVEIKR

SEQ ID NO: 519 - protein, 108 aa, synthetic construct
  REGION 1..108: note = Anti-CLL-1 K244 Selective Full VL
DIQMTQSPSSLSASVGDRVTITCQASQDINDYLNWYQQKPGKAPKLLIYGASNLQSGVPSRFSGSGSGTDFTLTISSLQPEDFATYYCLQHNSYPLTFGQGTKLEIKR

SEQ ID NO: 520 - protein, 108 aa, synthetic construct
  REGION 1..108: note = Anti-CLL-1 K244 Selective Full VL
DIQMTQSPSSLSASVGDRVTITCRASQGISNYLAWYQQKPGKAPKLLIYDASNLETGVPSRFSGSGSGTDFTLTISSLQPEDFATYYCQQSYNVPPTFGQGTKVEIKR

SEQ ID NO: 521 - protein, 108 aa, synthetic construct
  REGION 1..108: note = Anti-CLL-1 K244 Selective Full VL
DIQMTQSPSSLSASVGDRVTITCRASQSISSYLNWYQQKPGKAPKLLIYDASNLETGVPSRFSGSGSGTDFTLTISSLQPEDFATYYCQQANSFPLTFGQGTKVEIKR

SEQ ID NO: 522 - protein, 108 aa, synthetic construct
  REGION 1..108: note = Anti-CLL-1 K244 Selective Full VL
EIVMTQSPATLSVSPGERATLSCRASQSIGTYLAWYQQKPGQAPRLLIYDASSRATGIPARFSGSGSGTEFTLTISSLQSEDFAVYYCQQYKSYPLTFGGGTKVEIKR

SEQ ID NO: 523 - protein, 108 aa, synthetic construct
  REGION 1..108: note = Anti-CLL-1 K244 Selective Full VL
DIQMTQSPSSLSASVGDRVTITCQASQDISNYLNWYQQKPGKAPKLLIYGASSLQSGVPSRFSGSGSGTDFTLTISSLQPEDFATYYCQQHNSYPWTFGQGTKVEIKR

SEQ ID NO: 524 - protein, 108 aa, synthetic construct
  REGION 1..108: note = Anti-CLL-1 K244 Selective Full VL
DIQMTQSPSSLSASVGDRVTITCRASQGIHNYLAWYQQKPGKAPKLLIYDASNLETGVPSRFSGSGSGTDFTLTISSLQPEDFATYYCQQTSSFPYTFGQGTKLEIKR

SEQ ID NO: 525 - protein, 108 aa, synthetic construct
  REGION 1..108: note = Anti-CLL-1 K244 Selective Full VL
DIQMTQSPSSLSASVGDRVTITCQASQDISNYLNWYQQKPGKAPKLLIYDASNLQSGVPSRFSGSGSGTDFTLTISSLQPEDFATYYCLQHNSYPLTFGGGTKVEIKR

SEQ ID NO: 526 - protein, 113 aa, synthetic construct
  REGION 1..113: note = Anti-CLL-1 K244 Selective Full VL
DIVMTQSPLSLPVTPGEPASISCRSSQSLLHSNGYNYLDWYLQKPGQSPQLLIYAASTLQSGVPDRFSGSGSGTDFTLKISRVEAEDVGVYYCMQGTHWPPTFGPGTKVDIKR

SEQ ID NO: 527 - protein, 108 aa, synthetic construct
  REGION 1..108: note = Anti-CLL-1 K244 Selective Full VL
DIQMTQSPSSLSASVGDRVTITCRASQSIGTYLNWYQQKPGKAPKLLIYAASSLQSGVPSRFSGSGSGTDFTLTISSLQPEDFATYYCQQSYTDPWTFGQGTKVEIKR

SEQ ID NO: 528 - protein, 108 aa, synthetic construct
  REGION 1..108: note = Anti-CLL-1 K244 Selective Full VL
DIQMTQSPSSLSASVGDRVTITCRASQSIFSYLNWYQQKPGKAPKLLIYSASNLQSGVPSRFSGSGSGTDFTLTISSLQPEDFATYYCQQSYSTPITFGQGTKVEIKR

SEQ ID NO: 529 - protein, 9 aa, synthetic construct
  REGION 1..9: note = Anti-CLL-1 K244Q Selective HCDR1
DTFTRHYVH

SEQ ID NO: 530 - protein, 9 aa, synthetic construct
  REGION 1..9: note = Anti-CLL-1 K244Q Selective HCDR1
YTFSSYDIN

SEQ ID NO: 531 - protein, 9 aa, synthetic construct
  REGION 1..9: note = Anti-CLL-1 K244Q Selective HCDR1
YTFTSYYIH

SEQ ID NO: 532 - protein, 9 aa, synthetic construct
  REGION 1..9: note = Anti-CLL-1 K244Q Selective HCDR1
MSVTSNHMS

SEQ ID NO: 533 - protein, 9 aa, synthetic construct
  REGION 1..9: note = Anti-CLL-1 K244Q Selective HCDR1
FTFSNHYMS

SEQ ID NO: 534 - protein, 9 aa, synthetic construct
  REGION 1..9: note = Anti-CLL-1 K244Q Selective HCDR1
GTFSNYAIS

SEQ ID NO: 535 - protein, 9 aa, synthetic construct
  REGION 1..9: note = Anti-CLL-1 K244Q Selective HCDR1
FTVSSNYMS

SEQ ID NO: 536 - protein, 9 aa, synthetic construct
  REGION 1..9: note = Anti-CLL-1 K244Q Selective HCDR1
YTFTKYEIN

SEQ ID NO: 537 - protein, 9 aa, synthetic construct
  REGION 1..9: note = Anti-CLL-1 K244Q Selective HCDR1
YTFTDYYIH

SEQ ID NO: 538 - protein, 9 aa, synthetic construct
  REGION 1..9: note = Anti-CLL-1 K244Q Selective HCDR1
YTFTTYYMH

SEQ ID NO: 539 - protein, 9 aa, synthetic construct
  REGION 1..9: note = Anti-CLL-1 K244Q Selective HCDR1
YTFTGHYMH

SEQ ID NO: 540 - protein, 9 aa, synthetic construct
  REGION 1..9: note = Anti-CLL-1 K244Q Selective HCDR1
GTFSRYPFS

SEQ ID NO: 541 - protein, 9 aa, synthetic construct
  REGION 1..9: note = Anti-CLL-1 K244Q Selective HCDR1
YTFTSDYMH

SEQ ID NO: 542 - protein, 9 aa, synthetic construct
  REGION 1..9: note = Anti-CLL-1 K244Q Selective HCDR1
FTFTSYYMH

SEQ ID NO: 543 - protein, 9 aa, synthetic construct
  REGION 1..9: note = Anti-CLL-1 K244Q Selective HCDR1
FTFSDHYMS

SEQ ID NO: 544 - protein, 9 aa, synthetic construct
  REGION 1..9: note = Anti-CLL-1 K244Q Selective HCDR1
GTFSNYDIS

SEQ ID NO: 545 - protein, 9 aa, synthetic construct
  REGION 1..9: note = Anti-CLL-1 K244Q Selective HCDR1
YTFTDYYMH

SEQ ID NO: 546 - protein, 9 aa, synthetic construct
  REGION 1..9: note = Anti-CLL-1 K244Q Selective HCDR1
GTFSNYAIS

SEQ ID NO: 547 - protein, 9 aa, synthetic construct
  REGION 1..9: note = Anti-CLL-1 K244Q Selective HCDR1
YTFTGYYMH

SEQ ID NO: 548 - protein, 9 aa, synthetic construct
  REGION 1..9: note = Anti-CLL-1 K244Q Selective HCDR1
YTFTTYGIS

SEQ ID NO: 549 - protein, 9 aa, synthetic construct
  REGION 1..9: note = Anti-CLL-1 K244Q Selective HCDR1
YSFTNYYIH

SEQ ID NO: 550 - protein, 9 aa, synthetic construct
  REGION 1..9: note = Anti-CLL-1 K244Q Selective HCDR1
YTFTGYHIH

SEQ ID NO: 551 - protein, 13 aa, synthetic construct
  REGION 1..13: note = Anti-CLL-1 K244Q Selective HCDR2
GRVNPRDGRTNSA

SEQ ID NO: 552 - protein, 13 aa, synthetic construct
  REGION 1..13: note = Anti-CLL-1 K244Q Selective HCDR2
GWINPRNGGTDYA

SEQ ID NO: 553 - protein, 13 aa, synthetic construct
  REGION 1..13: note = Anti-CLL-1 K244Q Selective HCDR2
GWMNPNDGKTAYA

SEQ ID NO: 554 - protein, 12 aa, synthetic construct
  REGION 1..12: note = Anti-CLL-1 K244Q Selective HCDR2
SSIYPDGKTYYA

SEQ ID NO: 555 - protein, 13 aa, synthetic construct
  REGION 1..13: note = Anti-CLL-1 K244Q Selective HCDR2
AVIWPDGSKEYYA

SEQ ID NO: 556 - protein, 13 aa, synthetic construct
  REGION 1..13: note = Anti-CLL-1 K244Q Selective HCDR2
GWISAYNGNSDYA

SEQ ID NO: 557 - protein, 12 aa, synthetic construct
  REGION 1..12: note = Anti-CLL-1 K244Q Selective HCDR2
AVIYSDGKTYYA

SEQ ID NO: 558 - protein, 13 aa, synthetic construct
  REGION 1..13: note = Anti-CLL-1 K244Q Selective HCDR2
GGIIPIFGTANYA

SEQ ID NO: 559 - protein, 13 aa, synthetic construct
  REGION 1..13: note = Anti-CLL-1 K244Q Selective HCDR2
GLIDPSGGSTSIA

SEQ ID NO: 560 - protein, 13 aa, synthetic construct
  REGION 1..13: note = Anti-CLL-1 K244Q Selective HCDR2
GIINVSAGTTSYA

SEQ ID NO: 561 - protein, 13 aa, synthetic construct
  REGION 1..13: note = Anti-CLL-1 K244Q Selective HCDR2
GWISTDNGNANYA

SEQ ID NO: 562 - protein, 13 aa, synthetic construct
  REGION 1..13: note = Anti-CLL-1 K244Q Selective HCDR2
GWMNPNNGDTGYA

SEQ ID NO: 563 - protein, 13 aa, synthetic construct
  REGION 1..13: note = Anti-CLL-1 K244Q Selective HCDR2
GWMNPNSGGTNYA

SEQ ID NO: 564 - protein, 13 aa, synthetic construct
  REGION 1..13: note = Anti-CLL-1 K244Q Selective HCDR2
GWMNPNSGNTGYA

SEQ ID NO: 565 - protein, 12 aa, synthetic construct
  REGION 1..12: note = Anti-CLL-1 K244Q Selective HCDR2
SIIYPDGKTYYA

SEQ ID NO: 566 - protein, 13 aa, synthetic construct
  REGION 1..13: note = Anti-CLL-1 K244Q Selective HCDR2
GGIIPIFGTANYA

SEQ ID NO: 567 - protein, 13 aa, synthetic construct
  REGION 1..13: note = Anti-CLL-1 K244Q Selective HCDR2
GWMNPNSGYTAYA

SEQ ID NO: 568 - protein, 13 aa, synthetic construct
  REGION 1..13: note = Anti-CLL-1 K244Q Selective HCDR2
GWINPNSGGTNYA

SEQ ID NO: 569 - protein, 13 aa, synthetic construct
  REGION 1..13: note = Anti-CLL-1 K244Q Selective HCDR2
GIINPIGGLTTYA

SEQ ID NO: 570 - protein, 13 aa, synthetic construct
  REGION 1..13: note = Anti-CLL-1 K244Q Selective HCDR2
GWINPNSGDTNYA

SEQ ID NO: 571 - protein, 13 aa, synthetic construct
  REGION 1..13: note = Anti-CLL-1 K244Q Selective HCDR2
GWMNPYTGQTGYA

SEQ ID NO: 572 - protein, 13 aa, synthetic construct
  REGION 1..13: note = Anti-CLL-1 K244Q Selective HCDR2
GRINPNSGGTDYA

SEQ ID NO: 573 - protein, 21 aa, synthetic construct
  REGION 1..21: note = Anti-CLL-1 K244Q Selective HCDR3
CAKDMFPTVTGTYYYYGMDVW

SEQ ID NO: 574 - protein, 14 aa, synthetic construct
  REGION 1..14: note = Anti-CLL-1 K244Q Selective HCDR3
CARHRWELDSFDYW

SEQ ID NO: 575 - protein, 14 aa, synthetic construct
  REGION 1..14: note = Anti-CLL-1 K244Q Selective HCDR3
CARDDDYGGYVAYW

SEQ ID NO: 576 - protein, 12 aa, synthetic construct
  REGION 1..12: note = Anti-CLL-1 K244Q Selective HCDR3
CARDEEDWFDPW

SEQ ID NO: 577 - protein, 14 aa, synthetic construct
  REGION 1..14: note = Anti-CLL-1 K244Q Selective HCDR3
CAREDYYGSGMDYW

SEQ ID NO: 578 - protein, 10 aa, synthetic construct [sequence omitted]

SEQ ID NO: 579 - protein, 14 aa, synthetic construct
  REGION 1..14: note = Anti-CLL-1 K244Q Selective HCDR3
CAREDSSGSHFDYW

SEQ ID NO: 580 - protein, 15 aa, synthetic construct
  REGION 1..15: note = Anti-CLL-1 K244Q Selective HCDR3
CARGSGWYTPLFDYW

SEQ ID NO: 581 - protein, 16 aa, synthetic construct
  REGION 1..16: note = Anti-CLL-1 K244Q Selective HCDR3
CARDYDILTGSGFDPW

SEQ ID NO: 582 - protein, 17 aa, synthetic construct
  REGION 1..17: note = Anti-CLL-1 K244Q Selective HCDR3
CAKEPYPHQSGWFFDYW

SEQ ID NO: 583 - protein, 13 aa, synthetic construct
  REGION 1..13: note = Anti-CLL-1 K244Q Selective HCDR3
CARDTADYYFDYW

SEQ ID NO: 584 - protein, 12 aa, synthetic construct
  REGION 1..12: note = Anti-CLL-1 K244Q Selective HCDR3
CARGDYPYMDVW

SEQ ID NO: 585 - protein, 12 aa, synthetic construct
  REGION 1..12: note = Anti-CLL-1 K244Q Selective HCDR3
CARDYITGPSDW

SEQ ID NO: 586 - protein, 15 aa, synthetic construct
  REGION 1..15: note = Anti-CLL-1 K244Q Selective HCDR3
CARGHSRTDYGMDVW

SEQ ID NO: 587 - protein, 16 aa, synthetic construct
  REGION 1..16: note = Anti-CLL-1 K244Q Selective HCDR3
CAREGSYGDYDGMDVW

SEQ ID NO: 588 - protein, 14 aa, synthetic construct
  REGION 1..14: note = Anti-CLL-1 K244Q Selective HCDR3
CAREAEEGGWFDPW

SEQ ID NO: 589 - protein, 17 aa, synthetic construct
  REGION 1..17: note = Anti-CLL-1 K244Q Selective HCDR3
CAKDTPGSGWSSGMDVW

SEQ ID NO: 590 - protein, 17 aa, synthetic construct
  REGION 1..17: note = Anti-CLL-1 K244Q Selective HCDR3
CARVGYYDSSGGGMDVW

SEQ ID NO: 591 - protein, 17 aa, synthetic construct
  REGION 1..17: note = Anti-CLL-1 K244Q Selective HCDR3
CASGAYGDYVDWYFDLW

SEQ ID NO: 592 - protein, 14 aa, synthetic construct
  REGION 1..14: note = Anti-CLL-1 K244Q Selective HCDR3
CARLTTATDSFDLW

SEQ ID NO: 593 - protein, 13 aa, synthetic construct
  REGION 1..13: note = Anti-CLL-1 K244Q Selective HCDR3
CTTDEETMDFHLW

SEQ ID NO: 594 - protein, 17 aa, synthetic construct
  REGION 1..17: note = Anti-CLL-1 K244Q Selective HCDR3
CARETYSGSYEESFDYW

SEQ ID NO: 595 - protein, 11 aa, synthetic construct
  REGION 1..11: note = Anti-CLL-1 K244Q Selective LCDR1
RASQGISSYLA

SEQ ID NO: 596 - protein, 11 aa, synthetic construct
  REGION 1..11: note = Anti-CLL-1 K244Q Selective LCDR1
RASQSISNYLN

SEQ ID NO: 597 - protein, 11 aa, synthetic construct
  REGION 1..11: note = Anti-CLL-1 K244Q Selective LCDR1
RASESISGWLA

SEQ ID NO: 598 - protein, 11 aa, synthetic construct
  REGION 1..11: note = Anti-CLL-1 K244Q Selective LCDR1
QASQSISNWLA

SEQ ID NO: 599 - protein, 11 aa, synthetic construct
  REGION 1..11: note = Anti-CLL-1 K244Q Selective LCDR1
QASQDISNYLN

SEQ ID NO: 600 - protein, 11 aa, synthetic construct
  REGION 1..11: note = Anti-CLL-1 K244Q Selective LCDR1
QASEDINKYLN

SEQ ID NO: 601 - protein, 11 aa, synthetic construct
  REGION 1..11: note = Anti-CLL-1 K244Q Selective LCDR1
RASQSISTYLN

SEQ ID NO: 602 - protein, 11 aa, synthetic construct
  REGION 1..11: note = Anti-CLL-1 K244Q Selective LCDR1
RASQGISNNLN

SEQ ID NO: 603 - protein, 11 aa, synthetic construct
  REGION 1..11: note = Anti-CLL-1 K244Q Selective LCDR1
RASQSVSSYLA

SEQ ID NO: 604 - protein, 11 aa, synthetic construct
  REGION 1..11: note = Anti-CLL-1 K244Q Selective LCDR1
QASQDINNYLN

SEQ ID NO: 605 - protein, 12 aa, synthetic construct
  REGION 1..12: note = Anti-CLL-1 K244Q Selective LCDR1
SASQSVGSSYFA

SEQ ID NO: 606 - protein, 11 aa, synthetic construct
  REGION 1..11: note = Anti-CLL-1 K244Q Selective LCDR1
QASQDISNYLN

SEQ ID NO: 607 - protein, 11 aa, synthetic construct
  REGION 1..11: note = Anti-CLL-1 K244Q Selective LCDR1
RASQGIRNDLG

SEQ ID NO: 608 - protein, 11 aa, synthetic construct
  REGION 1..11: note = Anti-CLL-1 K244Q Selective LCDR1
RASQSISSWLA

SEQ ID NO: 609 - protein, 11 aa, synthetic construct
  REGION 1..11: note = Anti-CLL-1 K244Q Selective LCDR1
QASQDISNYLN

SEQ ID NO: 610 - protein, 11 aa, synthetic construct
  REGION 1..11: note = Anti-CLL-1 K244Q Selective LCDR1
RASQSVSSYLA

SEQ ID NO: 611 - protein, 11 aa, synthetic construct
  REGION 1..11: note = Anti-CLL-1 K244Q Selective LCDR1
RVSQGISSYLN

SEQ ID NO: 612 - protein, 11 aa, synthetic construct
  REGION 1..11: note = Anti-CLL-1 K244Q Selective LCDR1
RASQSISSWLA

SEQ ID NO: 613 - protein, 11 aa, synthetic construct
  REGION 1..11: note = Anti-CLL-1 K244Q Selective LCDR1
RASQSVSNWLA

SEQ ID NO: 614 - protein, 16 aa, synthetic construct
  REGION 1..16: note = Anti-CLL-1 K244Q Selective LCDR1
RSSRSLLHSNGYNYLD

SEQ ID NO: 615 - protein, 11 aa, synthetic construct
  REGION 1..11: note = Anti-CLL-1 K244Q Selective LCDR1
RASQSISRYLN

SEQ ID NO: 616 - protein, 16 aa, synthetic construct
  REGION 1..16: note = Anti-CLL-1 K244Q Selective LCDR1
RSSRSLLHSNGYNYLD

SEQ ID NO: 617 - protein, 7 aa, synthetic construct
  REGION 1..7: note = Anti-CLL-1 K244Q Selective LCDR2
DASNLET

SEQ ID NO: 618 - protein, 7 aa, synthetic construct
  REGION 1..7: note = Anti-CLL-1 K244Q Selective LCDR2
ATSSLQS

SEQ ID NO: 619 - protein, 7 aa, synthetic construct
  REGION 1..7: note = Anti-CLL-1 K244Q Selective LCDR2
DASNLET

SEQ ID NO: 620 - protein, 7 aa, synthetic construct
  REGION 1..7: note = Anti-CLL-1 K244Q Selective LCDR2
AASTLQS

SEQ ID NO: 621 - protein, 7 aa, synthetic construct
  REGION 1..7: note = Anti-CLL-1 K244Q Selective LCDR2
GASTLQS

SEQ ID NO: 622 - protein, 7 aa, synthetic construct
  REGION 1..7: note = Anti-CLL-1 K244Q Selective LCDR2
DASNLET

SEQ ID NO: 623 - protein, 7 aa, synthetic construct
  REGION 1..7: note = Anti-CLL-1 K244Q Selective LCDR2
DASNLET

SEQ ID NO: 624 - protein, 7 aa, synthetic construct
  REGION 1..7: note = Anti-CLL-1 K244Q Selective LCDR2
DASYLET

SEQ ID NO: 625 - protein, 7 aa, synthetic construct
  REGION 1..7: note = Anti-CLL-1 K244Q Selective LCDR2
DASARAT

SEQ ID NO: 626 - protein, 7 aa, synthetic construct
  REGION 1..7: note = Anti-CLL-1 K244Q Selective LCDR2
DASNLET

SEQ ID NO: 627 - protein, 7 aa, synthetic construct
  REGION 1..7: note = Anti-CLL-1 K244Q Selective LCDR2
DVSTRAT

SEQ ID NO: 628 - protein, 7 aa, synthetic construct
  REGION 1..7: note = Anti-CLL-1 K244Q Selective LCDR2
DASNLET

SEQ ID NO: 629 - protein, 7 aa, synthetic construct
  REGION 1..7: note = Anti-CLL-1 K244Q Selective LCDR2
AASSLQP

SEQ ID NO: 630 - protein, 7 aa, synthetic construct
  REGION 1..7: note = Anti-CLL-1 K244Q Selective LCDR2
DTSSLQS

SEQ ID NO: 631 - protein, 7 aa, synthetic construct
  REGION 1..7: note = Anti-CLL-1 K244Q Selective LCDR2
GASTLQS

SEQ ID NO: 632 - protein, 7 aa, synthetic construct
  REGION 1..7: note = Anti-CLL-1 K244Q Selective LCDR2
GASTRAT

SEQ ID NO: 633 - protein, 7 aa, synthetic construct
  REGION 1..7: note = Anti-CLL-1 K244Q Selective LCDR2
DASNLET

SEQ ID NO: 634 - protein, 7 aa, synthetic construct
  REGION 1..7: note = Anti-CLL-1 K244Q Selective LCDR2
DASNLET

SEQ ID NO: 635 - protein, 7 aa, synthetic construct
  REGION 1..7: note = Anti-CLL-1 K244Q Selective LCDR2
DASNLQT

SEQ ID NO: 636 - protein, 7 aa, synthetic construct
  REGION 1..7: note = Anti-CLL-1 K244Q Selective LCDR2
LGSYRAS

SEQ ID NO: 637 - protein, 7 aa, synthetic construct
  REGION 1..7: note = Anti-CLL-1 K244Q Selective LCDR2
DASNLET

SEQ ID NO: 638 - protein, 7 aa, synthetic construct
  REGION 1..7: note = Anti-CLL-1 K244Q Selective LCDR2
LGSDRAS

SEQ ID NO: 639 - protein, 11 aa, synthetic construct
  REGION 1..11: note = Anti-CLL-1 K244Q Selective LCDR3
CQQASGFPYTF

SEQ ID NO: 640 - protein, 11 aa, synthetic construct
  REGION 1..11: note = Anti-CLL-1 K244Q Selective LCDR3
CQQGYNIPFTF

SEQ ID NO: 641 - protein, 11 aa, synthetic construct
  REGION 1..11: note = Anti-CLL-1 K244Q Selective LCDR3
CQQYDTWPFTF

SEQ ID NO: 642 - protein, 11 aa, synthetic construct [sequence omitted]

SEQ ID NO: 643 - protein, 11 aa, synthetic construct [sequence omitted]

SEQ ID NO: 644 - protein, 11 aa, synthetic construct [sequence omitted]

SEQ ID NO: 645 - protein, 11 aa, synthetic construct [sequence omitted]

SEQ ID NO: 646 - protein, 11 aa, synthetic construct [sequence omitted]

SEQ ID NO: 647 - protein, 10 aa, synthetic construct
  REGION 1..10: note = Anti-CLL-1 K244Q Selective LCDR3
CQQYRSSVTF

SEQ ID NO: 648 - protein, 11 aa, synthetic construct [sequence omitted]

SEQ ID NO: 649 - protein, 11 aa, synthetic construct [sequence omitted]

SEQ ID NO: 650 - protein, 11 aa, synthetic construct [sequence omitted]

SEQ ID NO: 651 - protein, 11 aa, synthetic construct
  REGION 1..11: note = Anti-CLL-1 K244Q Selective LCDR3
CLQTNSFPWTF

SEQ ID NO: 652 - protein, 11 aa, synthetic construct [sequence omitted]

SEQ ID NO: 653 - protein, 11 aa, synthetic construct [sequence omitted]

SEQ ID NO: 654 - protein, 11 aa, synthetic construct
  REGION 1..11: note = Anti-CLL-1 K244Q Selective LCDR3
CQQYAFSPITF

SEQ ID NO: 655 - protein, 11 aa, synthetic construct [sequence omitted]

SEQ ID NO: 656 - protein, 11 aa, synthetic construct
  REGION 1..11: note = Anti-CLL-1 K244Q Selective LCDR3
CLQTHSFPLTF

SEQ ID NO: 657 - protein, 11 aa, synthetic construct [sequence omitted]

SEQ ID NO: 658 - protein, 11 aa, synthetic construct [sequence omitted]

SEQ ID NO: 659 - protein, 11 aa, synthetic construct [sequence omitted]

SEQ ID NO: 660 - protein, 11 aa, synthetic construct [sequence omitted]

SEQ ID NO: 661 - protein, 126 aa, synthetic construct
  REGION 1..126: note = Anti-CLL-1 K244Q Full VH
QVQLVQSGAEVKKPGASVKVSCKASGDTFTRHYVHWVRQAPGQGLEWMGRVNPRDGRTNSAQKFQGRVTMTRDTSTSTVYMELSSLRSEDTAVYYCAKDMFPTVTGTYYYYGMDVWGQGTTVTVSS

SEQ ID NO: 662 - protein, 119 aa, synthetic construct
  REGION 1..119: note = Anti-CLL-1 K244Q Full VH
QVQLVQSGAEVKKPGASVKVSCKASGYTFSSYDINWVRQAPGQGLEWVGWINPRNGGTDYAQKFQGRVTMTRDTSTSTVYMELSSLRSEDTAVYYCARHRWELDSFDYWGQGTLVTVSS

SEQ ID NO: 663 - protein, 119 aa, synthetic construct
  REGION 1..119: note = Anti-CLL-1 K244Q Full VH
QVQLVQSGAEVKKPGASVKVSCKASGYTFTSYYIHWVRQAPGQGLEWMGWMNPNDGKTAYAQRFQGRVTMTRDTSTSTVYMELSSLRSEDTAVYYCARDDDYGGYVAYWGQGTLVTVSS

SEQ ID NO: 664 - protein, 116 aa, synthetic construct
  REGION 1..116: note = Anti-CLL-1 K244Q Full VH
EVQLLESGGGLVQPGGSLRLSCAASGMSVTSNHMSWVRQAPGKGLEWVSSIYPDGKTYYADSVKGRFTISRDNSKNTLYLQMNSLRAEDTAVYYCARDEEDWFDPWGQGTLVTVSS

SEQ ID NO: 665 - protein, 119 aa, synthetic construct
  REGION 1..119: note = Anti-CLL-1 K244Q Full VH
EVQLLESGGGLVQPGGSLRLSCAASGFTFSNHYMSWVRQAPGKGLEWVAVIWPDGSKEYYADSVKGRFTISRDNSKNTLYLQMNSLRAEDTAVYYCAREDYYGSGMDYWGQGTLVTVSS

SEQ ID NO: 666 - protein, 115 aa, synthetic construct
  REGION 1..115: note = Anti-CLL-1 K244Q Full VH
QVQLVQSGAEVKKPGASVKVSCKASGGTFSNYAISWVRQAPGQGLEWMGWISAYNGNSDYAQNLQGRVTMTRDTSTSTVYMELSSLRSEDTAVYYCAIGDYFDYWGQGTLVTVSS

SEQ ID NO: 667 - protein, 118 aa, synthetic construct
  REGION 1..118: note = Anti-CLL-1 K244Q Full VH
EVQLLESGGGLVQPGGSLRLSCAASGFTVSSNYMSWVRQAPGKGLEWVAVIYSDGKTYYADSVKGRFTISRDNSKNTLYLQMNSLRAEDTAVYYCAREDSSGSHFDYWGQGTLVTVSS

SEQ ID NO: 668 - protein, 120 aa, synthetic construct
  REGION 1..120: note = Anti-CLL-1 K244Q Full VH
QVQLVQSGAEVKKPGSSVKVSCKASGYTFTKYEINWVRQAPGQGLEWMGGIIPIFGTANYAQKFQGRVTITADESTSTAYMELSSLRSEDTAVYYCARGSGWYTPLFDYWGQGTLVTVSS

SEQ ID NO: 669 - protein, 121 aa, synthetic construct
  REGION 1..121: note = Anti-CLL-1 K244Q Full VH
QVQLVQSGAEVKKPGASVKVSCKASGYTFTDYYIHWVRQAPGQGLEWMGLIDPSGGSTSIAQKFQGRVTMTRDTSTSTVYMELSSLRSEDTAVYYCARDYDILTGSGFDPWGQGTLVTVSS

SEQ ID NO: 670 - protein, 122 aa, synthetic construct
  REGION 1..122: note = Anti-CLL-1 K244Q Full VH
QVQLVQSGAEVKKPGASVKVSCKASGYTFTTYYMHWVRQAPGQGLEWMGIINVSAGTTSYAQKFQGRVTMTRDTSTSTVYMELSSLRSEDTAVYYCAKEPYPHQSGWFFDYWGQGTLVTVSS

SEQ ID NO: 671 - protein, 118 aa, synthetic construct
  REGION 1..118: note = Anti-CLL-1 K244Q Full VH
QVQLVQSGAEVKKPGASVKVSCKASGYTFTGHYMHWVRQAPGQGLEWMGWISTDNGNANYAQKFQGRVTMTRDTSTSTVYMELSSLRSEDTAVYYCARDTADYYFDYWGQGTLVTVSS

SEQ ID NO: 672 - protein, 117 aa, synthetic construct
  REGION 1..117: note = Anti-CLL-1 K244Q Full VH
QVQLVQSGAEVKKPGSSVKVSCKASGGTFSRYPFSWVRQAPGQGLEWMGWMNPNNGDTGYAQKFQGRVTITADESTSTAYMELSSLRSEDTAVYYCARGDYPYMDVWGKGTTVTVSS

SEQ ID NO: 673 - protein, 117 aa, synthetic construct
  REGION 1..117: note = Anti-CLL-1 K244Q Full VH
QVQLVQSGAEVKKPGASVKVSCKASGYTFTSDYMHWVRQAPGQGLEWMGWMNPNSGGTNYAQKFQGRVTMTRDTSTSTVYMELSSLRSEDTAVYYCARDYITGPSDWGQGTLVTVSS

SEQ ID NO: 674 - protein, 120 aa, synthetic construct
  REGION 1..120: note = Anti-CLL-1 K244Q Full VH
QVQLVQSGAEVKKPGASVKVSCKASGFTFTSYYMHWVRQAPGQGLEWMGWMNPNSGNTGYAQRFQGRVTMTRDTSTSTVYMELSSLRSEDTAVYYCARGHSRTDYGMDVWGQGTTVTVSS

SEQ ID NO: 675 - protein, 120 aa, synthetic construct
  REGION 1..120: note = Anti-CLL-1 K244Q Full VH
EVQLLESGGGLVQPGGSLRLSCAASGFTFSDHYMSWVRQAPGKGLEWVSIIYPDGKTYYADSVKGRFTISRDNSKNTLYLQMNSLRAEDTAVYYCAREGSYGDYDGMDVWGQGTTVTVSS

SEQ ID NO: 676 - protein, 119 aa, synthetic construct
  REGION 1..119: note = Anti-CLL-1 K244Q Full VH
QVQLVQSGAEVKKPGSSVKVSCKASGGTFSNYDISWVRQAPGQGLEWMGGIIPIFGTANYAQKFQGRVTITADESTSTAYMELSSLRSEDTAVYYCAREAEEGGWFDPWGQGTLVTVSS

SEQ ID NO: 677 - protein, 122 aa, synthetic construct
  REGION 1..122: note = Anti-CLL-1 K244Q Full VH
QVQLVQSGAEVKKPGASVKVSCKASGYTFTDYYMHWVRQAPGQGLEWMGWMNPNSGYTAYAQKFQGRVTMTRDTSTSTVYMELSSLRSEDTAVYYCAKDTPGSGWSSGMDVWGQGTTVTVSS

SEQ ID NO: 678 - protein, 122 aa, synthetic construct
  REGION 1..122: note = Anti-CLL-1 K244Q Full VH
QVQLVQSGAEVKKPGASVKVSCKASGGTFSNYAISWVRQAPGQGLEWMGWINPNSGGTNYAQKFQGRVTMTRDTSTSTVYMELSSLRSEDTAVYYCARVGYYDSSGGGMDVWGQGTTVTVSS

SEQ ID NO: 679 - protein, 122 aa, synthetic construct
  REGION 1..122: note = Anti-CLL-1 K244Q Full VH
QVQLVQSGAEVKKPGASVKVSCKASGYTFTGYYMHWVRQAPGQGLEWMGIINPIGGLTTYAQKFQGRVTMTRDTSTSTVYMELSSLRSEDTAVYYCASGAYGDYVDWYFDLWGRGTLVTVSS

SEQ ID NO: 680 - protein, 119 aa, synthetic construct
  REGION 1..119: note = Anti-CLL-1 K244Q Full VH
QVQLVQSGAEVKKPGASVKVSCKASGYTFTTYGISWVRQAPGQGLEWMGWINPNSGDTNYAQKFQGRVTMTRDTSTSTVYMELSSLRSEDTAVYYCARLTTATDSFDLWGRGTLVTVSS

SEQ ID NO: 681 - protein, 118 aa, synthetic construct
  REGION 1..118: note = Anti-CLL-1 K244Q Full VH
QVQLVQSGAEVKKPGASVKVSCKASGYSFTNYYIHWVRQAPGQGLEWMGWMNPYTGQTGYAQKFQGRVTMTRDTSTSTVYMELSSLRSEDTAVYYCTTDEETMDFHLWGRGTLVTVSS

SEQ ID NO: 682 - protein, 122 aa, synthetic construct
  REGION 1..122: note = Anti-CLL-1 K244Q Full VH
QVQLVQSGAEVKKPGASVKVSCKASGYTFTGYHIHWVRQAPGQGLEWMGRINPNSGGTDYAQKFQGRVTMTRDTSTSTVYMELSSLRSEDTAVYYCARETYSGSYEESFDYWGQGTLVTVSS

SEQ ID NO: 683 - protein, 108 aa, synthetic construct
  REGION 1..108: note = Anti-CLL-1 K244Q Full VL
DIQMTQSPSSLSASVGDRVTITCRASQGISSYLAWYQQKPGKAPKLLIYDASNLETGVPSRFSGSGSGTDFTLTISSLQPEDFATYYCQQASGFPYTFGQGTRLEIKR

SEQ ID NO: 684 - protein, 108 aa, synthetic construct
  REGION 1..108: note = Anti-CLL-1 K244Q Full VL
DIQMTQSPSSLSASVGDRVTITCRASQSISNYLNWYQQKPGKAPKLLIYATSSLQSGVPSRFSGSGSGTDFTLTISSLQPEDFATYYCQQGYNIPFTFGQGTKLEIKR

SEQ ID NO: 685 - protein, 108 aa, synthetic construct
  REGION 1..108: note = Anti-CLL-1 K244Q Full VL
DIQMTQSPSSLSASVGDRVTITCRASESISGWLAWYQQKPGKAPKLLIYDASNLETGVPSRFSGSGSGTDFTLTISSLQPEDFATYYCQQYDTWPFTFGPGTKVDIKR

SEQ ID NO: 686 - protein, 108 aa, synthetic construct
  REGION 1..108: note = Anti-CLL-1 K244Q Full VL
DIQMTQSPSSLSASVGDRVTITCQASQSISNWLAWYQQKPGKAPKLLIYAASTLQSGVPSRFSGSGSGTDFTLTISSLQPEDFATYYCQQSYSTPWTFGQGTKVEIKR

SEQ ID NO: 687 - protein, 108 aa, synthetic construct
  REGION 1..108: note = Anti-CLL-1 K244Q Full VL
DIQMTQSPSSLSASVGDRVTITCQASQDISNYLNWYQQKPGKAPKLLIYGASTLQSGVPSRFSGSGSGTDFTLTISSLQPEDFATYYCQQYDSYPPTFGGGTKVEIKR

SEQ ID NO: 688 - protein, 108 aa, synthetic construct
  REGION 1..108: note = Anti-CLL-1 K244Q Full VL
DIQMTQSPSSLSASVGDRVTITCQASEDINKYLNWYQQKPGKAPKLLIYDASNLETGVPSRFSGSGSGTDFTLTISSLQPEDFATYYCQQANSFPLTFGQGTKVEIKR

SEQ ID NO: 689 - protein, 108 aa, synthetic construct
  REGION 1..108: note = Anti-CLL-1 K244Q Full VL
DIQMTQSPSSLSASVGDRVTITCRASQSISTYLNWYQQKPGKAPKLLIYDASNLETGVPSRFSGSGSGTDFTLTISSLQPEDFATYYCQQAHSFPPTFGQGTRLEIKR

SEQ ID NO: 690 - protein, 108 aa, synthetic construct
  REGION 1..108: note = Anti-CLL-1 K244Q Full VL
DIQMTQSPSSLSASVGDRVTITCRASQGISNNLNWYQQKPGKAPKLLIYDASYLETGVPSRFSGSGSGTDFTLTISSLQPEDFATYYCQQSYSAPLTFGQGTKVEIKR

SEQ ID NO: 691 - protein, 107 aa, synthetic construct
  REGION 1..107: note = Anti-CLL-1 K244Q Full VL
EIVMTQSPATLSVSPGERATLSCRASQSVSSYLAWYQQKPGQAPRLLIYDASARATGIPARFSGSGSGTEFTLTISSLQSEDFAVYYCQQYRSSVTFGQGTRLEIKR

SEQ ID NO: 692 - protein, 108 aa, synthetic construct
  REGION 1..108: note = Anti-CLL-1 K244Q Full VL
DIQMTQSPSSLSASVGDRVTITCQASQDINNYLNWYQQKPGKAPKLLIYDASNLETGVPSRFSGSGSGTDFTLTISSLQPEDFATYYCQQANSFPLTFGGGTKVEIKR

SEQ ID NO: 693 - protein, 109 aa, synthetic construct
  REGION 1..109: note = Anti-CLL-1 K244Q Full VL
EIVMTQSPATLSVSPGERATLSCSASQSVGSSYFAWYQQKPGQAPRLLIYDVSTRATGIPARFSGSGSGTEFTLTISSLQSEDFAVYYCQQYYSTPLTFGPGTKVDIKR

SEQ ID NO: 694 - protein, 108 aa, synthetic construct
  REGION 1..108: note = Anti-CLL-1 K244Q Full VL
DIQMTQSPSSLSASVGDRVTITCQASQDISNYLNWYQQKPGKAPKLLIYDASNLETGVPSRFSGSGSGTDFTLTISSLQPEDFATYYCQQSYSIPYTFGQGTKLEIKR

SEQ ID NO: 695 - protein, 108 aa, synthetic construct
  REGION 1..108: note = Anti-CLL-1 K244Q Full VL
DIQMTQSPSSLSASVGDRVTITCRASQGIRNDLGWYQQKPGKAPKLLIYAASSLQPGVPSRFSGSGSGTDFTLTISSLQPEDFATYYCLQTNSFPWTFGQGTKLEIKR

SEQ ID NO: 696 - protein, 108 aa, synthetic construct
  REGION 1..108: note = Anti-CLL-1 K244Q Full VL
DIQMTQSPSSLSASVGDRVTITCRASQSISSWLAWYQQKPGKAPKLLIYDTSSLQSGVPSRFSGSGSGTDFTLTISSLQPEDFATYYCQQGYSTPLTFGQGTKVEIKR

SEQ ID NO: 697 - protein, 108 aa, synthetic construct
  REGION 1..108: note = Anti-CLL-1 K244Q Full VL
DIQMTQSPSSLSASVGDRVTITCQASQDISNYLNWYQQKPGKAPKLLIYGASTLQSGVPSRFSGSGSGTDFTLTISSLQPEDFATYYCQQSYSTPWTFGQGTKLEIKR

SEQ ID NO: 698 - protein, 108 aa, synthetic construct
  REGION 1..108: note = Anti-CLL-1 K244Q Full VL
EIVMTQSPATLSVSPGERATLSCRASQSVSSYLAWYQQKPGQAPRLLIYGASTRATGIPARFSGSGSGTEFTLTISSLQSEDFAVYYCQQYAFSPITFGQGTKLEIKR

SEQ ID NO: 699 - protein, 108 aa, synthetic construct
  REGION 1..108: note = Anti-CLL-1 K244Q Full VL
DIQMTQSPSSLSASVGDRVTITCRVSQGISSYLNWYQQKPGKAPKLLIYDASNLETGVPSRFSGSGSGTDFTLTISSLQPEDFATYYCQQSYSTPLTFGGGTKVEIKR

SEQ ID NO: 700 - protein, 108 aa, synthetic construct
  REGION 1..108: note = Anti-CLL-1 K244Q Full VL
DIQMTQSPSSLSASVGDRVTITCRASQSISSWLAWYQQKPGKAPKLLIYDASNLETGVPSRFSGSGSGTDFTLTISSLQPEDFATYYCLQTHSFPLTFGPGTKVDIKR

SEQ ID NO: 701 - protein, 108 aa, synthetic construct
  REGION 1..108: note = Anti-CLL-1 K244Q Full VL
DIQMTQSPSSLSASVGDRVTITCRASQSVSNWLAWYQQKPGKAPKLLIYDASNLQTGVPSRFSGSGSGTDFTLTISSLQPEDFATYYCQQANSFPLTFGGGTKLEIKR

SEQ ID NO: 702 - protein, 113 aa, synthetic construct
  REGION 1..113: note = Anti-CLL-1 K244Q Full VL
DIVMTQSPLSLPVTPGEPASISCRSSRSLLHSNGYNYLDWYLQKPGQSPQLLIYLGSYRASGVPDRFSGSGSGTDFTLKISRVEAEDVGVYYCMQGTHWPPTFGQGTKLEIKR

SEQ ID NO: 703 - protein, 108 aa, synthetic construct
  REGION 1..108: note = Anti-CLL-1 K244Q Full VL
DIQMTQSPSSLSASVGDRVTITCZASQSISSYLNWYQQKPGKAPKLLIYDASNLETGVPSRFSGSGSGTDFTLTISSLQPEDFATYYCQQANTFPITFGQGTRLEIKR

SEQ ID NO: 704 - protein, 113 aa, synthetic construct
  REGION 1..113: note = Anti-CLL-1 K244Q Full VL
DIVMTQSPLSLPVTPGEPASISCRSSRSLLHSNGYNYLDWYLQKPGQSPQLLIYLGSDRASGVPDRFSGSGSGTDFTLKISRVEAEDVGVYYCMQGTHWPPTFGQGTKVEIKR

SEQ ID NO: 705 - protein, 9 aa, synthetic construct
  REGION 1..9: note = Non-Selective Anti-CD33 HCDR1
YTFTNYYMH

SEQ ID NO: 706 - protein, 9 aa, synthetic construct
  REGION 1..9: note = Non-Selective Anti-CD33 HCDR1
FTFSNSDMN

SEQ ID NO: 707 - protein, 9 aa, synthetic construct
  REGION 1..9: note = Non-Selective Anti-CD33 HCDR1
GTFSSYAIS

SEQ ID NO: 708 - protein, 9 aa, synthetic construct
  REGION 1..9: note = Non-Selective Anti-CD33 HCDR1
YTFTNHYMH

SEQ ID NO: 709 - protein, 9 aa, synthetic construct
  REGION 1..9: note = Non-Selective Anti-CD33 HCDR1
YSFTNYDIS

SEQ ID NO: 710 - protein, 9 aa, synthetic construct
  REGION 1..9: note = Non-Selective Anti-CD33 HCDR1
YTFTTYDIN

SEQ ID NO: 711 - protein, 9 aa, synthetic construct
  REGION 1..9: note = Non-Selective Anti-CD33 HCDR1
YSFTTYDIN

SEQ ID NO: 712 - protein, 9 aa, synthetic construct
  REGION 1..9: note = Non-Selective Anti-CD33 HCDR1
GTFSSYAIS

SEQ ID NO: 713 - protein, 9 aa, synthetic construct
  REGION 1..9: note = Non-Selective Anti-CD33 HCDR1
FTFRSYWMT

SEQ ID NO: 714 - protein, 9 aa, synthetic construct
  REGION 1..9: note = Non-Selective Anti-CD33 HCDR1
GSFSSSAIN

SEQ ID NO: 715 - protein, 9 aa, synthetic construct
  REGION 1..9: note = Non-Selective Anti-CD33 HCDR1
YTFSDYHIH

SEQ ID NO: 716 - protein, 7 aa, synthetic construct
  REGION 1..7: note = Non-Selective Anti-CD33 HCDR1
ATRSWMH

SEQ ID NO: 717 - protein, 9 aa, synthetic construct
  REGION 1..9: note = Non-Selective Anti-CD33 HCDR1
FTFSSYGVH

SEQ ID NO: 718 - protein, 9 aa, synthetic construct
  REGION 1..9: note = Non-Selective Anti-CD33 HCDR1
FTFSNAWMS

SEQ ID NO: 719 - protein, 9 aa, synthetic construct
  REGION 1..9: note = Non-Selective Anti-CD33 HCDR1
YTFTGYYMH

SEQ ID NO: 720 - protein, 9 aa, synthetic construct
  REGION 1..9: note = Non-Selective Anti-CD33 HCDR1
FTFSSSWMH

SEQ ID NO: 721 - protein, 9 aa, synthetic construct
  REGION 1..9: note = Non-Selective Anti-CD33 HCDR1
FTFNNAWMT

SEQ ID NO: 722 - protein, 9 aa, synthetic construct
  REGION 1..9: note = Non-Selective Anti-CD33 HCDR1
YTFTGYYMH

SEQ ID NO: 723 - protein, 9 aa, synthetic construct
  REGION 1..9: note = Non-Selective Anti-CD33 HCDR1
YTFTDYYIH

SEQ ID NO: 724 - protein, 9 aa, synthetic construct
  REGION 1..9: note = Non-Selective Anti-CD33 HCDR1
YTFTNYDIN

SEQ ID NO: 725 - protein, 9 aa, synthetic construct
  REGION 1..9: note = Non-Selective Anti-CD33 HCDR1
YTFTTYGIS

SEQ ID NO: 726 - protein, 9 aa, synthetic construct
  REGION 1..9: note = Non-Selective Anti-CD33 HCDR1
YTFTDYYVH

SEQ ID NO: 727 - protein, 9 aa, synthetic construct
  REGION 1..9: note = Non-Selective Anti-CD33 HCDR1
GTFTSYGIS

SEQ ID NO: 728 - protein, 9 aa, synthetic construct
  REGION 1..9: note = Non-Selective Anti-CD33 HCDR1
STLTGYDIH

SEQ ID NO: 729 - protein, 9 aa, synthetic construct
  REGION 1..9: note = Non-Selective Anti-CD33 HCDR1
GTFSSYDIN

SEQ ID NO: 730 - protein, 9 aa, synthetic construct
  REGION 1..9: note = Non-Selective Anti-CD33 HCDR1
GTFSKYAIS

SEQ ID NO: 731 - protein, 9 aa, synthetic construct
  REGION 1..9: note = Non-Selective Anti-CD33 HCDR1
YTFTGYYMH

SEQ ID NO: 732 - protein, 9 aa, synthetic construct
  REGION 1..9: note = Non-Selective Anti-CD33 HCDR1
FTFSNYAMA

SEQ ID NO: 733 - protein, 9 aa, synthetic construct
  REGION 1..9: note = Non-Selective Anti-CD33 HCDR1
FTFGDYPMS

SEQ ID NO: 734 - protein, 9 aa, synthetic construct
  REGION 1..9: note = Non-Selective Anti-CD33 HCDR1
FTISNAWMS

SEQ ID NO: 735 - protein, 9 aa, synthetic construct
  REGION 1..9: note = Non-Selective Anti-CD33 HCDR1
NTLTNDHIH

SEQ ID NO: 736 - protein, 9 aa, synthetic construct
  REGION 1..9: note = Non-Selective Anti-CD33 HCDR1
YTFTTYYMH

SEQ ID NO: 737 - protein, 9 aa, synthetic construct
  REGION 1..9: note = Non-Selective Anti-CD33 HCDR1
DSFTDYYIH

SEQ ID NO: 738 - protein, 9 aa, synthetic construct
  REGION 1..9: note = Non-Selective Anti-CD33 HCDR1
YTFTDYWLH

SEQ ID NO: 739 - protein, 9 aa, synthetic construct
  REGION 1..9: note = Non-Selective Anti-CD33 HCDR1
FILGNAWMH

SEQ ID NO: 740 - protein, 9 aa, synthetic construct
  REGION 1..9: note = Non-Selective Anti-CD33 HCDR1
FTFSSYWMH

SEQ ID NO: 741 - protein, 9 aa, synthetic construct
  REGION 1..9: note = Non-Selective Anti-CD33 HCDR1
YSFTTYDIH

SEQ ID NO: 742 - protein, 9 aa, synthetic construct
  REGION 1..9: note = Non-Selective Anti-CD33 HCDR1
FTFTTYDMH

SEQ ID NO: 743 - protein, 9 aa, synthetic construct
  REGION 1..9: note = Non-Selective Anti-CD33 HCDR1
YTFTNHHMH

SEQ ID NO: 744 - protein, 9 aa, synthetic construct
  REGION 1..9: note = Non-Selective Anti-CD33 HCDR1
YTFTNYYIH

SEQ ID NO: 745 - protein, 9 aa, synthetic construct
  REGION 1..9: note = Non-Selective Anti-CD33 HCDR1
FSLRNYWMH

SEQ ID NO: 746 - protein, 9 aa, synthetic construct
  REGION 1..9: note = Non-Selective Anti-CD33 HCDR1
GTFSNYAIS

SEQ ID NO: 747 - protein, 9 aa, synthetic construct
  REGION 1..9: note = Non-Selective Anti-CD33 HCDR1
GTFSNYAIN

SEQ ID NO: 748 - protein, 9 aa, synthetic construct
  REGION 1..9: note = Non-Selective Anti-CD33 HCDR1
FTFNNYGMH

SEQ ID NO: 749 - protein, 9 aa, synthetic construct
  REGION 1..9: note = Non-Selective Anti-CD33 HCDR1
FTFSSSWMH

SEQ ID NO: 750 - protein, 9 aa, synthetic construct
  REGION 1..9: note = Non-Selective Anti-CD33 HCDR1
YTFDSYLLH

SEQ ID NO: 751 - protein, 9 aa, synthetic construct
  REGION 1..9: note = Non-Selective Anti-CD33 HCDR1
YSFTTYGIT

SEQ ID NO: 752 - protein, 9 aa, synthetic construct
  REGION 1..9: note = Non-Selective Anti-CD33 HCDR1
DTLTNHFVH

SEQ ID NO: 753 - protein, 9 aa, synthetic construct
  REGION 1..9: note = Non-Selective Anti-CD33 HCDR1
YTFTDYYIH

SEQ ID NO: 754 - protein, 9 aa, synthetic construct
  REGION 1..9: note = Non-Selective Anti-CD33 HCDR1
YTFSSYDMH

SEQ ID NO: 755 - protein, 9 aa, synthetic construct
  REGION 1..9: note = Non-Selective Anti-CD33 HCDR1
YTLSDHDIN

SEQ ID NO: 756 - protein, 9 aa, synthetic construct
  REGION 1..9: note = Non-Selective Anti-CD33 HCDR1
ITVSSSWMH

SEQ ID NO: 757 - protein, 9 aa, synthetic construct
  REGION 1..9: note = Non-Selective Anti-CD33 HCDR1
GTFSSYAIS

SEQ ID NO: 758 - protein, 9 aa, synthetic construct
  REGION 1..9: note = Non-Selective Anti-CD33 HCDR1
FTFSSYWMH

SEQ ID NO: 759 - protein, 9 aa, synthetic construct
  REGION 1..9: note = Non-Selective Anti-CD33 HCDR1
YTFTGYYMH

SEQ ID NO: 760 - protein, 13 aa, synthetic construct
  REGION 1..13: note = Non-Selective Anti-CD33 HCDR2
GWINPNSGDTNYE

SEQ ID NO: 761 - protein, 13 aa, synthetic construct
  REGION 1..13: note = Non-Selective Anti-CD33 HCDR2
SYISGTGSTIYYA

SEQ ID NO: 762 - protein, 13 aa, synthetic construct
  REGION 1..13: note = Non-Selective Anti-CD33 HCDR2
GWMNPNSGNTGYA

SEQ ID NO: 763 - protein, 13 aa, synthetic construct
  REGION 1..13: note = Non-Selective Anti-CD33 HCDR2
GIINPSGGSTSYA

SEQ ID NO: 764 - protein, 13 aa, synthetic construct
  REGION 1..13: note = Non-Selective Anti-CD33 HCDR2
GWVNPNSGNTGYA

SEQ ID NO: 765 - protein, 13 aa, synthetic construct
  REGION 1..13: note = Non-Selective Anti-CD33 HCDR2
GWISGYNGNTGYA

SEQ ID NO: 766 - protein, 13 aa, synthetic construct
  REGION 1..13: note = Non-Selective Anti-CD33 HCDR2
GRMNPNSGNTGYA

SEQ ID NO: 767 - protein, 13 aa, synthetic construct
  REGION 1..13: note = Non-Selective Anti-CD33 HCDR2
GWMNPSSANTGYA

SEQ ID NO: 768 - protein, 13 aa, synthetic construct
  REGION 1..13: note = Non-Selective Anti-CD33 HCDR2
SVISGSGDNTYYA

SEQ ID NO: 769 - protein, 13 aa, synthetic construct
  REGION 1..13: note = Non-Selective Anti-CD33 HCDR2
GWMNPNSGNTGYA

SEQ ID NO: 770 - protein, 13 aa, synthetic construct
  REGION 1..13: note = Non-Selective Anti-CD33 HCDR2
GWMNPNSGNTGYA

SEQ ID NO: 771 - protein, 13 aa, synthetic construct
  REGION 1..13: note = Non-Selective Anti-CD33 HCDR2
GIINPSGDSTSYA

SEQ ID NO: 772 - protein, 13 aa, synthetic construct
  REGION 1..13: note = Non-Selective Anti-CD33 HCDR2
SAISGDGGDTYYA

SEQ ID NO: 773 - protein, 13 aa, synthetic construct
  REGION 1..13: note = Non-Selective Anti-CD33 HCDR2
SGIGGSGGTIYYA

SEQ ID NO: 774 - protein, 13 aa, synthetic construct
  REGION 1..13: note = Non-Selective Anti-CD33 HCDR2
GWMNPDSGDTNYA

SEQ ID NO: 775 - protein, 13 aa, synthetic construct
  REGION 1..13: note = Non-Selective Anti-CD33 HCDR2
AVISYDGSEEYYA

SEQ ID NO: 776 - protein, 13 aa, synthetic construct
  REGION 1..13: note = Non-Selective Anti-CD33 HCDR2
AVISYDGSNKYYA

SEQ ID NO: 777 - protein, 13 aa, synthetic construct
  REGION 1..13: note = Non-Selective Anti-CD33 HCDR2
GRIKPNSGGTDYA

SEQ ID NO: 778 - protein, 13 aa, synthetic construct
  REGION 1..13: note = Non-Selective Anti-CD33 HCDR2
GGIIPIFGTANYA

SEQ ID NO: 779 - protein, 13 aa, synthetic construct
  REGION 1..13: note = Non-Selective Anti-CD33 HCDR2
GWMNPNSGNTGLV

SEQ ID NO: 780 - protein, 13 aa, synthetic construct
  REGION 1..13: note = Non-Selective Anti-CD33 HCDR2
GWMNPNSGNTGYA

SEQ ID NO: 781 - protein, 13 aa, synthetic construct
  REGION 1..13: note = Non-Selective Anti-CD33 HCDR2
GWMNPNSGNTGYA

SEQ ID NO: 782 - protein, 13 aa, synthetic construct
  REGION 1..13: note = Non-Selective Anti-CD33 HCDR2
GWINPNTGVTNYA

SEQ ID NO: 783 - protein, 13 aa, synthetic construct
  REGION 1..13: note = Non-Selective Anti-CD33 HCDR2
GGIIPFLGTASYA

SEQ ID NO: 784 - protein, 13 aa, synthetic construct
  REGION 1..13: note = Non-Selective Anti-CD33 HCDR2
GGLIPVFGTTHYA

SEQ ID NO: 785 - protein, 13 aa, synthetic construct
  REGION 1..13: note = Non-Selective Anti-CD33 HCDR2
GWMNPNSGNTGYA

SEQ ID NO: 786 - protein, 13 aa, synthetic construct
  REGION 1..13: note = Non-Selective Anti-CD33 HCDR2
GIISPSGGSPTYA

SEQ ID NO: 787 - protein, 13 aa, synthetic construct
  REGION 1..13: note = Non-Selective Anti-CD33 HCDR2
SAISGSGGGTYYA

SEQ ID NO: 788 - protein, 13 aa, synthetic construct
  REGION 1..13: note = Non-Selective Anti-CD33 HCDR2
AGISYDGLNEHYA

SEQ ID NO: 789 - protein, 13 aa, synthetic construct
  REGION 1..13: note = Non-Selective Anti-CD33 HCDR2
AHIWNDGSQKYYA

SEQ ID NO: 790 - protein, 13 aa, synthetic construct
  REGION 1..13: note = Non-Selective Anti-CD33 HCDR2
GWMNPNSGDTGYA

SEQ ID NO: 791 - protein, 13 aa, synthetic construct
  REGION 1..13: note = Non-Selective Anti-CD33 HCDR2
GWMNPNSGNTGYA

SEQ ID NO: 792 - protein, 13 aa, synthetic construct
  REGION 1..13: note = Non-Selective Anti-CD33 HCDR2
GWMNPNSGNTGYA

SEQ ID NO: 793 - protein, 13 aa, synthetic construct
  REGION 1..13: note = Non-Selective Anti-CD33 HCDR2
GTINPSGGSTSYS

SEQ ID NO: 794 - protein, 13 aa, synthetic construct
  REGION 1..13: note = GTINPSGGSTSYS
ASVSGDGSDENYA

SEQ ID NO: 795 - protein, 13 aa, synthetic construct
  REGION 1..13: note = Non-Selective Anti-CD33 HCDR2
AVIWYDGSNKYYA

SEQ ID NO: 796 - protein, 13 aa, synthetic construct
  REGION 1..13: note = Non-Selective Anti-CD33 HCDR2
GWMNPNSGNTGYA

SEQ ID NO: 797 - protein, 13 aa, synthetic construct
  REGION 1..13: note = Non-Selective Anti-CD33 HCDR2
AGINWNSVIIDYA

SEQ ID NO: 798 - protein, 13 aa, synthetic construct
  REGION 1..13: note = Non-Selective Anti-CD33 HCDR2
GMINPSGGSTSYA

SEQ ID NO: 799 - protein, 13 aa, synthetic construct
  REGION 1..13: note = Non-Selective Anti-CD33 HCDR2
GWTNPINGDTGSA

SEQ ID NO: 800 - protein, 13 aa, synthetic construct
  REGION 1..13: note = Non-Selective Anti-CD33 HCDR2
SGISGSGGSTYYA

SEQ ID NO: 801 - protein, 13 aa, synthetic construct
  REGION 1..13: note = Non-Selective Anti-CD33 HCDR2
AWMNPNSGNTGYA

SEQ ID NO: 802 - protein, 13 aa, synthetic construct
  REGION 1..13: note = Non-Selective Anti-CD33 HCDR2
GWINPNSGGTDSA

SEQ ID NO: 803 - protein, 13 aa, synthetic construct
  REGION 1..13: note = Non-Selective Anti-CD33 HCDR2
SAISGSGGSTYYA

SEQ ID NO: 804 - protein, 13 aa, synthetic construct
  REGION 1..13: note = Non-Selective Anti-CD33 HCDR2
SAISSSGDATYYA

SEQ ID NO: 805 - protein, 13 aa, synthetic construct
  REGION 1..13: note = Non-Selective Anti-CD33 HCDR2
GMINPSGAGTTYA

SEQ ID NO: 806 - protein, 13 aa, synthetic construct
  REGION 1..13: note = Non-Selective Anti-CD33 HCDR2
GWINPNSGNAGYA

SEQ ID NO: 807 - protein, 13 aa, synthetic construct
  REGION 1..13: note = Non-Selective Anti-CD33 HCDR2
GWMNPNSGNTGYA

SEQ ID NO: 808 - protein, 13 aa, synthetic construct
  REGION 1..13: note = Non-Selective Anti-CD33 HCDR2
GMVNPSGGSANYA

SEQ ID NO: 809 - protein, 13 aa, synthetic construct
  REGION 1..13: note = Non-Selective Anti-CD33 HCDR2
GVINPGGGYTNYA

SEQ ID NO: 810 - protein, 13 aa, synthetic construct
  REGION 1..13: note = Non-Selective Anti-CD33 HCDR2
GWMNPSTGNTGYA

SEQ ID NO: 811 - protein, 12 aa, synthetic construct
  REGION 1..12: note = Non-Selective Anti-CD33 HCDR2
SAIGTGGGTHYA

SEQ ID NO: 812 - protein, 13 aa, synthetic construct
  REGION 1..13: note = Non-Selective Anti-CD33 HCDR2
GVISPNGDTTVYA

SEQ ID NO: 813 - protein, 13 aa, synthetic construct
  REGION 1..13: note = Non-Selective Anti-CD33 HCDR2
AVISYDGSDKYYA

SEQ ID NO: 814 - protein, 13 aa, synthetic construct
  REGION 1..13: note = Non-Selective Anti-CD33 HCDR2
GWMNANSGNTGFA

SEQ ID NO: 815 - protein, 16 aa, synthetic construct
  REGION 1..16: note = Non-Selective Anti-CD33 HCDR3
CARDDRIQLWVPLVFW

SEQ ID NO: 816 - protein, 19 aa, synthetic construct
  REGION 1..19: note = Non-Selective Anti-CD33 HCDR3
CAKDYDSSYGSGYYGMDVW

SEQ ID NO: 817 - protein, 16 aa, synthetic construct
  REGION 1..16: note = Non-Selective Anti-CD33 HCDR3
CAREDYYDSSGNFDYW

SEQ ID NO: 818 - protein, 16 aa, synthetic construct
  REGION 1..16: note = Non-Selective Anti-CD33 HCDR3
CASAEVGATHYGMDVW

SEQ ID NO: 819 - protein, 21 aa, synthetic construct
  REGION 1..21: note = Non-Selective Anti-CD33 HCDR3
CAKDAPYYYDSSGYYGVFDYW

SEQ ID NO: 820 - protein, 17 aa, synthetic construct
  REGION 1..17: note = Non-Selective Anti-CD33 HCDR3
CAKDMGYGDYPDAFDIW

SEQ ID NO: 821 - protein, 11 aa, synthetic construct
  REGION 1..11: note = Non-Selective Anti-CD33 HCDR3
CARVVHGMDVW

SEQ ID NO: 822 - protein, 15 aa, synthetic construct
  REGION 1..15: note = Non-Selective Anti-CD33 HCDR3
CAKDEMELLTAFDIW

SEQ ID NO: 823 - protein, 12 aa, synthetic construct
  REGION 1..12: note = Non-Selective Anti-CD33 HCDR3
CARETTWGMDVW

SEQ ID NO: 824 - protein, 23 aa, synthetic construct
  REGION 1..23: note = Non-Selective Anti-CD33 HCDR3
CARDRGIAVAGASPYYYYGMDVW

SEQ ID NO: 825 - protein, 16 aa, synthetic construct
  REGION 1..16: note = Non-Selective Anti-CD33 HCDR3
CARTHSSGYYYWFDPW

SEQ ID NO: 826 - protein, 16 aa, synthetic construct
  REGION 1..16: note = Non-Selective Anti-CD33 HCDR3
CAKEPYSSSPYYFDYW

SEQ ID NO: 827 - protein, 17 aa, synthetic construct
  REGION 1..17: note = Non-Selective Anti-CD33 HCDR3
CARDTWDYSNYGGIDYW

SEQ ID NO: 828 - protein, 21 aa, synthetic construct
  REGION 1..21: note = Non-Selective Anti-CD33 HCDR3
CAREVAAPLHPFGYYYYMDVW

SEQ ID NO: 829 - protein, 14 aa, synthetic construct
  REGION 1..14: note = Non-Selective Anti-CD33 HCDR3
CATTRQPHYGMDVW

SEQ ID NO: 830 - protein, 19 aa, synthetic construct
  REGION 1..19: note = Non-Selective Anti-CD33 HCDR3
CARLTDYGDYVLGRYLSDW

SEQ ID NO: 831 - protein, 15 aa, synthetic construct
  REGION 1..15: note = Non-Selective Anti-CD33 HCDR3
CARMAVAGKGAFDIW

SEQ ID NO: 832 - protein, 20 aa, synthetic construct
  REGION 1..20: note = Non-Selective Anti-CD33 HCDR3
CARGAYSGSYYGPIEYFQHW

SEQ ID NO: 833 - protein, 22 aa, synthetic construct
  REGION 1..22: note = Non-Selective Anti-CD33 HCDR3
CAREPLWFGESSPHDYYGMDVW

SEQ ID NO: 834 - protein, 17 aa, synthetic construct
  REGION 1..17: note = Non-Selective Anti-CD33 HCDR3
CARGWGHGYGDYKFDYW

SEQ ID NO: 835 - protein, 14 aa, synthetic construct
  REGION 1..14: note = Non-Selective Anti-CD33 HCDR3
CAREGGDGDYPDYW

SEQ ID NO: 836 - protein, 22 aa, synthetic construct
  REGION 1..22: note = Non-Selective Anti-CD33 HCDR3
CARDFIWVEGYLASPPPRFDYW

SEQ ID NO: 837 - protein, 11 aa, synthetic construct
  REGION 1..11: note = Non-Selective Anti-CD33 HCDR3
CANEQGGFDYW

SEQ ID NO: 838 - protein, 14 aa, synthetic construct
  REGION 1..14: note = Non-Selective Anti-CD33 HCDR3
CARGGGSGYDLDYW

SEQ ID NO: 839 - protein, 19 aa, synthetic construct
  REGION 1..19: note = Non-Selective Anti-CD33 HCDR3
CATGLGVTTSNYYYGMDVW

SEQ ID NO: 840 - protein, 14 aa, synthetic construct
  REGION 1..14: note = Non-Selective Anti-CD33 HCDR3
CARDQGLTGYFDLW

SEQ ID NO: 841 - protein, 12 aa, synthetic construct
  REGION 1..12: note = Non-Selective Anti-CD33 HCDR3
CAREGNGGMDVW

SEQ ID NO: 842 - protein, 19 aa, synthetic construct
  REGION 1..19: note = Non-Selective Anti-CD33 HCDR3
CAREGGYDPDYYYYGMDVW

SEQ ID NO: 843 - protein, 15 aa, synthetic construct
  REGION 1..15: note = Non-Selective Anti-CD33 HCDR3
CARDRDSGPSGFQHW

SEQ ID NO: 844 - protein, 15 aa, synthetic construct
  REGION 1..15: note = Non-Selective Anti-CD33 HCDR3
CARDGALGVGPDDYW

SEQ ID NO: 845 - protein, 21 aa, synthetic construct
  REGION 1..21: note = Non-Selective Anti-CD33 HCDR3
CARAGVDTAMVTYYYYGMDVW

SEQ ID NO: 846 - protein, 19 aa, synthetic construct
  REGION 1..19: note = Non-Selective Anti-CD33 HCDR3
CARGHKVDSGYDPYGMDVW

SEQ ID NO: 847 - protein, 17 aa, synthetic construct
  REGION 1..17: note = Non-Selective Anti-CD33 HCDR3
CARDREYSSSSRYFDLW

SEQ ID NO: 848 - protein, 17 aa, synthetic construct
  REGION 1..17: note = Non-Selective Anti-CD33 HCDR3
CAKEEEGFWSGYAFDYW

SEQ ID NO: 849 - protein, 17 aa, synthetic construct
  REGION 1..17: note = Non-Selective Anti-CD33 HCDR3
CARDTHDYGDYAPFDYW

SEQ ID NO: 850 - protein, 13 aa, synthetic construct
  REGION 1..13: note = Non-Selective Anti-CD33 HCDR3
CVRDGARSGMDVW

SEQ ID NO: 851 - protein, 14 aa, synthetic construct
  REGION 1..14: note = Non-Selective Anti-CD33 HCDR3
CATDHWVLGGFDYW

SEQ ID NO: 852 - protein, 18 aa, synthetic construct
  REGION 1..18: note = Non-Selective Anti-CD33 HCDR3
CAKDLLYYYDSIGAFDIW

SEQ ID NO: 853 - protein, 18 aa, synthetic construct
  REGION 1..18: note = Non-Selective Anti-CD33 HCDR3
CARGRPVDIVATYYFDYW

SEQ ID NO: 854 - protein, 19 aa, synthetic construct
  REGION 1..19: note = Non-Selective Anti-CD33 HCDR3
CAKEGQLAWADYYYYMDVW

SEQ ID NO: 855 - protein, 12 aa, synthetic construct
  REGION 1..12: note = Non-Selective Anti-CD33 HCDR3
CARDYTGVVDYW

SEQ ID NO: 856 - protein, 19 aa, synthetic construct
  REGION 1..19: note = Non-Selective Anti-CD33 HCDR3
CARDGFIGFGELFSAFDIW

SEQ ID NO: 857 - protein, 24 aa, synthetic construct
  REGION 1..24: note = Non-Selective Anti-CD33 HCDR3
CARDSSLALSYGGNSEYYYGMDVW

SEQ ID NO: 858 - protein, 16 aa, synthetic construct
  REGION 1..16: note = Non-Selective Anti-CD33 HCDR3
CAREYMQQPHGGMDVW

SEQ ID NO: 859 - protein, 15 aa, synthetic construct
  REGION 1..15: note = Non-Selective Anti-CD33 HCDR3
CAKFSDGGAGDSDYW

SEQ ID NO: 860 - protein, 16 aa, synthetic construct
  REGION 1..16: note = Non-Selective Anti-CD33 HCDR3
CAKEGSIAAGYYFDSW

SEQ ID NO: 861 - protein, 16 aa, synthetic construct
  REGION 1..16: note = Non-Selective Anti-CD33 HCDR3
CASDLAGYSSGYFDLW

SEQ ID NO: 862 - protein, 17 aa, synthetic construct
  REGION 1..17: note = Non-Selective Anti-CD33 HCDR3
CARDPQMGAVAGGFDYW

SEQ ID NO: 863 - protein, 16 aa, synthetic construct
  REGION 1..16: note = Non-Selective Anti-CD33 HCDR3
CAKDSAWQEPYYFDYW

SEQ ID NO: 864 - protein, 14 aa, synthetic construct
  REGION 1..14: note = Non-Selective Anti-CD33 HCDR3
CARDEGWELLLDYW

SEQ ID NO: 865 - protein, 15 aa, synthetic construct
  REGION 1..15: note = Non-Selective Anti-CD33 HCDR3
CERDQLRFGAWFDPW

SEQ ID NO: 866 - protein, 12 aa, synthetic construct
  REGION 1..12: note = Non-Selective Anti-CD33 HCDR3
CARDQGGQIDHW

SEQ ID NO: 867 - protein, 18 aa, synthetic construct
  REGION 1..18: note = Non-Selective Anti-CD33 HCDR3
CARDRGVAHSYYYGMDVW

SEQ ID NO: 868 - protein, 17 aa, synthetic construct
  REGION 1..17: note = Non-Selective Anti-CD33 HCDR3
CARGLGGTTGTADFDYW

SEQ ID NO: 869 - protein, 18 aa, synthetic construct
  REGION 1..18: note = Non-Selective Anti-CD33 HCDR3
CARDSSSWLSGGGWFDPW

SEQ ID NO: 870 - protein, 11 aa, synthetic construct
  REGION 1..11: note = Non-Selective Anti-CD33 LCDR1
RASQGISNYLA

SEQ ID NO: 871 - protein, 11 aa, synthetic construct
  REGION 1..11: note = Non-Selective Anti-CD33 LCDR1
RASQSIYNYLN

SEQ ID NO: 872 - protein, 11 aa, synthetic construct
  REGION 1..11: note = Non-Selective Anti-CD33 LCDR1
QASHDINIHLN

SEQ ID NO: 873 - protein, 16 aa, synthetic construct
  REGION 1..16: note = Non-Selective Anti-CD33 LCDR1
RSSQSLLHSNGYNYLD

SEQ ID NO: 874 - protein, 16 aa, synthetic construct
  REGION 1..16: note = Non-Selective Anti-CD33 LCDR1
RSSQSLLHSNGYNYLD

SEQ ID NO: 875 - protein, 16 aa, synthetic construct
  REGION 1..16: note = Non-Selective Anti-CD33 LCDR1
RSSQSLLHSNGYNYLD

SEQ ID NO: 876 - protein, 16 aa, synthetic construct
  REGION 1..16: note = Non-Selective Anti-CD33 LCDR1
RSSQSLLHSNGYNYLD

SEQ ID NO: 877 - protein, 11 aa, synthetic construct
  REGION 1..11: note = Non-Selective Anti-CD33 LCDR1
RASQSIGSWLA

SEQ ID NO: 878 - protein, 11 aa, synthetic construct
  REGION 1..11: note = Non-Selective Anti-CD33 LCDR1
RASQSISSYLN

SEQ ID NO: 879 - protein, 11 aa, synthetic construct
  REGION 1..11: note = Non-Selective Anti-CD33 LCDR1
RASQDIGSYLA

SEQ ID NO: 880 - protein, 11 aa, synthetic construct
  REGION 1..11: note = Non-Selective Anti-CD33 LCDR1
RASQGISNNLN

SEQ ID NO: 881 - protein, 11 aa, synthetic construct
  REGION 1..11: note = Non-Selective Anti-CD33 LCDR1
RASQSISSWLA

SEQ ID NO: 882 - protein, 11 aa, synthetic construct
  REGION 1..11: note = Non-Selective Anti-CD33 LCDR1
RASQNINTFLN

SEQ ID NO: 883 - protein, 16 aa, synthetic construct
  REGION 1..16: note = Non-Selective Anti-CD33 LCDR1
RSSQSLLHSNGYNYLD

SEQ ID NO: 884 - protein, 16 aa, synthetic construct
  REGION 1..16: note = Non-Selective Anti-CD33 LCDR1
RSSQSLLHSNGYNYLD

SEQ ID NO: 885 - protein, 11 aa, synthetic construct
  REGION 1..11: note = Non-Selective Anti-CD33 LCDR1
RASQGISSYLA

SEQ ID NO: 886 - protein, 11 aa, synthetic construct
  REGION 1..11: note = Non-Selective Anti-CD33 LCDR1
RASQSIYSWLA

SEQ ID NO: 887 - protein, 11 aa, synthetic construct
  REGION 1..11: note = Non-Selective Anti-CD33 LCDR1
RASQSISWFLN

SEQ ID NO: 888 - protein, 11 aa, synthetic construct
  REGION 1..11: note = Non-Selective Anti-CD33 LCDR1
QASQDISNYLN

SEQ ID NO: 889 - protein, 17 aa, synthetic construct
  REGION 1..17: note = Non-Selective Anti-CD33 LCDR1
RSSQSLLYSSNNLNYLA

SEQ ID NO: 890 - protein, 12 aa, synthetic construct
  REGION 1..12: note = Non-Selective Anti-CD33 LCDR1
RASQSISSSSLA

SEQ ID NO: 891 - protein, 11 aa, synthetic construct
  REGION 1..11: note = Non-Selective Anti-CD33 LCDR1
RASQRIGNWLA

SEQ ID NO: 892 - protein, 12 aa, synthetic construct
  REGION 1..12: note = Non-Selective Anti-CD33 LCDR1
RASQSVAGSYLA

SEQ ID NO: 893 - protein, 11 aa, synthetic construct
  REGION 1..11: note = Non-Selective Anti-CD33 LCDR1
RSSESISSWLA

SEQ ID NO: 894 - protein, 11 aa, synthetic construct
  REGION 1..11: note = Non-Selective Anti-CD33 LCDR1
RASQGIRNDIG

SEQ ID NO: 895 - protein, 11 aa, synthetic construct
  REGION 1..11: note = Non-Selective Anti-CD33 LCDR1
RASQSIGNWLA

SEQ ID NO: 896 - protein, 16 aa, synthetic construct
  REGION 1..16: note = Non-Selective Anti-CD33 LCDR1
RSSQSLLHSNGYNYLD

SEQ ID NO: 897 - protein, 11 aa, synthetic construct
  REGION 1..11: note = Non-Selective Anti-CD33 LCDR1
RASQSISSYLN

SEQ ID NO: 898 - protein, 11 aa, synthetic construct
  REGION 1..11: note = Non-Selective Anti-CD33 LCDR1
RASQTIGTWLA

SEQ ID NO: 899 - protein, 16 aa, synthetic construct
  REGION 1..16: note = Non-Selective Anti-CD33 LCDR1
RSSQSLLHSNGYNYLD

SEQ ID NO: 900 - protein, 16 aa, synthetic construct
  REGION 1..16: note = Non-Selective Anti-CD33 LCDR1
RSSQSLLHSNGYNYLD

SEQ ID NO: 901 - protein, 11 aa, synthetic construct
  REGION 1..11: note = Non-Selective Anti-CD33 LCDR1
RASQSIGTYLH

SEQ ID NO: 902 - protein, 11 aa, synthetic construct
  REGION 1..11: note = Non-Selective Anti-CD33 LCDR1
RASQNIGNWLA

SEQ ID NO: 903 - protein, 11 aa, synthetic construct
  REGION 1..11: note = Non-Selective Anti-CD33 LCDR1
RASQSISSYLN

SEQ ID NO: 904 - protein, 11 aa, synthetic construct
  REGION 1..11: note = Non-Selective Anti-CD33 LCDR1
QASQDINNYLN

SEQ ID NO: 905 - protein, 11 aa, synthetic construct
  REGION 1..11: note = Non-Selective Anti-CD33 LCDR1
RASQSVSTYVA

SEQ ID NO: 906 - protein, 11 aa, synthetic construct
  REGION 1..11: note = Non-Selective Anti-CD33 LCDR1
QASQDISNYLN

SEQ ID NO: 907 - protein, 11 aa, synthetic construct
  REGION 1..11: note = Non-Selective Anti-CD33 LCDR1
RASQSISTWLA

SEQ ID NO: 908 - protein, 11 aa, synthetic construct
  REGION 1..11: note = Non-Selective Anti-CD33 LCDR1
QASQDIRNFLN

SEQ ID NO: 909 - protein, 11 aa, synthetic construct
  REGION 1..11: note = Non-Selective Anti-CD33 LCDR1
RASQGISSALA

SEQ ID NO: 910 - protein, 11 aa, synthetic construct
  REGION 1..11: note = Non-Selective Anti-CD33 LCDR1
RASQSISSYLN

SEQ ID NO: 911 - protein, 11 aa, synthetic construct
  REGION 1..11: note = Non-Selective Anti-CD33 LCDR1
RASQSIGTWLA

SEQ ID NO: 912 - protein, 11 aa, synthetic construct
  REGION 1..11: note = Non-Selective Anti-CD33 LCDR1
QASQDISDHLN

SEQ ID NO: 913 - protein, 11 aa, synthetic construct
  REGION 1..11: note = Non-Selective Anti-CD33 LCDR1
RASQSVNSYLA

SEQ ID NO: 914 - protein, 11 aa, synthetic construct
  REGION 1..11: note = Non-Selective Anti-CD33 LCDR1
RASQGISSYLA

SEQ ID NO: 915 - protein, 11 aa, synthetic construct
  REGION 1..11: note = Non-Selective Anti-CD33 LCDR1
RASQSIDSWLA

SEQ ID NO: 916 - protein, 17 aa, synthetic construct
  REGION 1..17: note = Non-Selective Anti-CD33 LCDR1
KSSQSVLYGSNNKNYLA

SEQ ID NO: 917 - protein, 11 aa, synthetic construct
  REGION 1..11: note = Non-Selective Anti-CD33 LCDR1
RASQRIGNWLA

SEQ ID NO: 918 - protein, 11 aa, synthetic construct
  REGION 1..11: note = Non-Selective Anti-CD33 LCDR1
RASQGISSYLA

SEQ ID NO: 919 - protein, 11 aa, synthetic construct
  REGION 1..11: note = Non-Selective Anti-CD33 LCDR1
RASQSVGSNLA

SEQ ID NO: 920 - protein, 11 aa, synthetic construct
  REGION 1..11: note = Non-Selective Anti-CD33 LCDR1
RASQGIRNYLA

SEQ ID NO: 921 - protein, 11 aa, synthetic construct
  REGION 1..11: note = Non-Selective Anti-CD33 LCDR1
RASQSISSWLA

SEQ ID NO: 922 - protein, 11 aa, synthetic construct
  REGION 1..11: note = Non-Selective Anti-CD33 LCDR1
RASQSISSYLN

SEQ ID NO: 923 - protein, 11 aa, synthetic construct
  REGION 1..11: note = Non-Selective Anti-CD33 LCDR1
RASQSISSYLN

SEQ ID NO: 924 - protein, 11 aa, synthetic construct
  REGION 1..11: note = Non-Selective Anti-CD33 LCDR1
RASQSIGTYLS

SEQ ID NO: 925 - protein, 7 aa, synthetic construct
  REGION 1..7: note = Non-Selective Anti-CD33 LCDR2
SASNLQS

SEQ ID NO: 926 - protein, 7 aa, synthetic construct
  REGION 1..7: note = Non-Selective Anti-CD33 LCDR2
AASNLQS

SEQ ID NO: 927 - protein, 7 aa, synthetic construct
  REGION 1..7: note = Non-Selective Anti-CD33 LCDR2
DASNLET

SEQ ID NO: 928 - protein, 7 aa, synthetic construct
  REGION 1..7: note = Non-Selective Anti-CD33 LCDR2
AASSLQS

SEQ ID NO: 929 - protein, 7 aa, synthetic construct
  REGION 1..7: note = Non-Selective Anti-CD33 LCDR2
AASSLQS

SEQ ID NO: 930 - protein, 7 aa, synthetic construct
  REGION 1..7: note = Non-Selective Anti-CD33 LCDR2
AASTLQS

SEQ ID NO: 931 - protein, 7 aa, synthetic construct
  REGION 1..7: note = Non-Selective Anti-CD33 LCDR2
LGSLRAP

SEQ ID NO: 932 - protein, 7 aa, synthetic construct
  REGION 1..7: note = Non-Selective Anti-CD33 LCDR2
GVSTLHS

SEQ ID NO: 933 - protein, 7 aa, synthetic construct
  REGION 1..7: note = Non-Selective Anti-CD33 LCDR2
DASNLET

SEQ ID NO: 934 - protein, 7 aa, synthetic construct
  REGION 1..7: note = Non-Selective Anti-CD33 LCDR2
AASSLQS

SEQ ID NO: 935 - protein, 7 aa, synthetic construct
  REGION 1..7: note = Non-Selective Anti-CD33 LCDR2
QASNKDT

SEQ ID NO: 936 - protein, 7 aa, synthetic construct
  REGION 1..7: note = Non-Selective Anti-CD33 LCDR2
GASSLQS

SEQ ID NO: 937 - protein, 7 aa, synthetic construct
  REGION 1..7: note = Non-Selective Anti-CD33 LCDR2
AASTLQS

SEQ ID NO: 938 - protein, 7 aa, synthetic construct
  REGION 1..7: note = Non-Selective Anti-CD33 LCDR2
LGSNRAS

SEQ ID NO: 939 - protein, 7 aa, synthetic construct
  REGION 1..7: note = Non-Selective Anti-CD33 LCDR2
LGSNRAS

SEQ ID NO: 940 - protein, 7 aa, synthetic construct
  REGION 1..7: note = Non-Selective Anti-CD33 LCDR2
AASSLQS

SEQ ID NO: 941 - protein, 7 aa, synthetic construct
  REGION 1..7: note = Non-Selective Anti-CD33 LCDR2
AASTLQS

SEQ ID NO: 942 - protein, 7 aa, synthetic construct
  REGION 1..7: note = Non-Selective Anti-CD33 LCDR2
AASSLQN

SEQ ID NO: 943 - protein, 7 aa, synthetic construct
  REGION 1..7: note = Non-Selective Anti-CD33 LCDR2
AASTLQS

SEQ ID NO: 944 - protein, 7 aa, synthetic construct
  REGION 1..7: note = Non-Selective Anti-CD33 LCDR2
WASTRES

SEQ ID NO: 945 - protein, 7 aa, synthetic construct
  REGION 1..7: note = Non-Selective Anti-CD33 LCDR2
GASTRAT

SEQ ID NO: 946 - protein, 7 aa, synthetic construct
  REGION 1..7: note = Non-Selective Anti-CD33 LCDR2
AASSLQS

SEQ ID NO: 947 - protein, 7 aa, synthetic construct
  REGION 1..7: note = Non-Selective Anti-CD33 LCDR2
GASTRAT

SEQ ID NO: 948 - protein, 7 aa, synthetic construct
  REGION 1..7: note = Non-Selective Anti-CD33 LCDR2
SASTLQS

SEQ ID NO: 949 - protein, 7 aa, synthetic construct
  REGION 1..7: note = Non-Selective Anti-CD33 LCDR2
AASTLQS

SEQ ID NO: 950 - protein, 7 aa, synthetic construct
  REGION 1..7: note = Non-Selective Anti-CD33 LCDR2
KASSLES

SEQ ID NO: 951 - protein, 7 aa, synthetic construct
  REGION 1..7: note = Non-Selective Anti-CD33 LCDR2
LGSNRAS

SEQ ID NO: 952 - protein, 7 aa, synthetic construct
  REGION 1..7: note = Non-Selective Anti-CD33 LCDR2
ATSRLQS

SEQ ID NO: 953 - protein, 7 aa, synthetic construct
  REGION 1..7: note = Non-Selective Anti-CD33 LCDR2
DASSLES

SEQ ID NO: 954 - protein, 7 aa, synthetic construct
  REGION 1..7: note = Non-Selective Anti-CD33 LCDR2
AASSLQS

SEQ ID NO: 955 - protein, 7 aa, synthetic construct
  REGION 1..7: note = Non-Selective Anti-CD33 LCDR2
MGSNRAS

SEQ ID NO: 956 - protein, 7 aa, synthetic construct
  REGION 1..7: note = Non-Selective Anti-CD33 LCDR2
AISTLQN

SEQ ID NO: 957 - protein, 7 aa, synthetic construct
  REGION 1..7: note = Non-Selective Anti-CD33 LCDR2
AASTLQS

SEQ ID NO: 958 - protein, 7 aa, synthetic construct
  REGION 1..7: note = Non-Selective Anti-CD33 LCDR2
AASSLQS

SEQ ID NO: 959 - protein, 7 aa, synthetic construct
  REGION 1..7: note = Non-Selective Anti-CD33 LCDR2
AASNLQS

SEQ ID NO: 960 - protein, 7 aa, synthetic construct
  REGION 1..7: note = Non-Selective Anti-CD33 LCDR2
GASTRAT

SEQ ID NO: 961 - protein, 7 aa, synthetic construct
  REGION 1..7: note = Non-Selective Anti-CD33 LCDR2
AASTLQS

SEQ ID NO: 962 - protein, 7 aa, synthetic construct
  REGION 1..7: note = Non-Selective Anti-CD33 LCDR2
AASSLQS

SEQ ID NO: 963 - protein, 7 aa, synthetic construct
  REGION 1..7: note = Non-Selective Anti-CD33 LCDR2
GASTLHS

SEQ ID NO: 964 - protein, 7 aa, synthetic construct
  REGION 1..7: note = Non-Selective Anti-CD33 LCDR2
AASSLQS

SEQ ID NO: 965 - protein, 7 aa, synthetic construct
  REGION 1..7: note = Non-Selective Anti-CD33 LCDR2
AASSLQS

SEQ ID NO: 966 - protein, 7 aa, synthetic construct
  REGION 1..7: note = Non-Selective Anti-CD33 LCDR2
GATRLLS

SEQ ID NO: 967 - protein, 7 aa, synthetic construct
  REGION 1..7: note = Non-Selective Anti-CD33 LCDR2
GASTLQS

SEQ ID NO: 968 - protein, 7 aa, synthetic construct
  REGION 1..7: note = Non-Selective Anti-CD33 LCDR2
GASTRAT

SEQ ID NO: 969 - protein, 7 aa, synthetic construct
  REGION 1..7: note = Non-Selective Anti-CD33 LCDR2
TASSLQS

SEQ ID NO: 970 - protein, 7 aa, synthetic construct
  REGION 1..7: note = Non-Selective Anti-CD33 LCDR2
AASSLQS

SEQ ID NO: 971 - protein, 7 aa, synthetic construct
  REGION 1..7: note = Non-Selective Anti-CD33 LCDR2
WASTRES

SEQ ID NO: 972 - protein, 7 aa, synthetic construct
  REGION 1..7: note = Non-Selective Anti-CD33 LCDR2
AASSLQS

SEQ ID NO: 973 - protein, 7 aa, synthetic construct
  REGION 1..7: note = Non-Selective Anti-CD33 LCDR2
DASNLDT

SEQ ID NO: 974 - protein, 7 aa, synthetic construct
  REGION 1..7: note = Non-Selective Anti-CD33 LCDR2
GASTRAT

SEQ ID NO: 975 - protein, 7 aa, synthetic construct
  REGION 1..7: note = Non-Selective Anti-CD33 LCDR2
AASSLQS

SEQ ID NO: 976 - protein, 7 aa, synthetic construct
  REGION 1..7: note = Non-Selective Anti-CD33 LCDR2
DASTLQS

SEQ ID NO: 977 - protein, 7 aa, synthetic construct
  REGION 1..7: note = Non-Selective Anti-CD33 LCDR2
AASSLHS

SEQ ID NO: 978 - protein, 7 aa, synthetic construct
  REGION 1..7: note = Non-Selective Anti-CD33 LCDR2
AASSLQS

SEQ ID NO: 979 - protein, 7 aa, synthetic construct
  REGION 1..7: note = Non-Selective Anti-CD33 LCDR2
AASSLQS

SEQ ID NO: 980 - protein, 11 aa, synthetic construct [sequence omitted]

SEQ ID NO: 981 - protein, 11 aa, synthetic construct [sequence omitted]

SEQ ID NO: 982 - protein, 11 aa, synthetic construct
  REGION 1..11: note = Non-Selective Anti-CD33 LCDR3
CQQAYSLPWTF

SEQ ID NO: 983 - protein, 10 aa, synthetic construct
  REGION 1..10: note = Non-Selective Anti-CD33 LCDR3
CMQALHPPTF

SEQ ID NO: 984 - protein, 11 aa, synthetic construct [sequence omitted]

SEQ ID NO: 985 - protein, 11 aa, synthetic construct [sequence omitted]

SEQ ID NO: 986 - protein, 11 aa, synthetic construct [sequence omitted]

SEQ ID NO: 987 - protein, 11 aa, synthetic construct
  REGION 1..11: note = Non-Selective Anti-CD33 LCDR3
CQQSYSTPPTF

SEQ ID NO: 988 - protein, 11 aa, synthetic construct
  REGION 1..11: note = Non-Selective Anti-CD33 LCDR3
CQQSSIIPLTF

SEQ ID NO: 989 - protein, 11 aa, synthetic construct [sequence omitted]

SEQ ID NO: 990 - protein, 11 aa, synthetic construct [sequence omitted]

SEQ ID NO: 991 - protein, 11 aa, synthetic construct [sequence omitted]

SEQ ID NO: 992 - protein, 11 aa, synthetic construct [sequence omitted]

SEQ ID NO: 993 - protein, 11 aa, synthetic construct [sequence omitted]

SEQ ID NO: 994 - protein, 10 aa, synthetic construct [sequence omitted]

SEQ ID NO: 995 - protein, 11 aa, synthetic construct [sequence omitted]

SEQ ID NO: 996 - protein, 11 aa, synthetic construct [sequence omitted]

SEQ ID NO: 997 - protein, 11 aa, synthetic construct [sequence omitted]

SEQ ID NO: 998 - protein, 11 aa, synthetic construct [sequence omitted]

SEQ ID NO: 999 - protein, 11 aa, synthetic construct [sequence omitted]

SEQ ID NO: 1000 - protein, 11 aa, synthetic construct
  REGION 1..11: note = Non-Selective Anti-CD33 LCDR3
CQQYETAPYTF

SEQ ID NO: 1001 - protein, 11 aa, synthetic construct [sequence omitted]

SEQ ID NO: 1002 - protein, 11 aa, synthetic construct [sequence omitted]

SEQ ID NO: 1003 - protein, 11 aa, synthetic construct [sequence omitted]

SEQ ID NO: 1004 - protein, 11 aa, synthetic construct
  REGION 1..11: note = Non-Selective Anti-CD33 LCDR3
CQQTYMMPYTF

SEQ ID NO: 1005 - protein, 11 aa, synthetic construct [sequence omitted]

SEQ ID NO: 1006 - protein, 11 aa, synthetic construct [sequence omitted]

SEQ ID NO: 1007 - protein, 11 aa, synthetic construct
  REGION 1..11: note = Non-Selective Anti-CD33 LCDR3
CQQGFNFPPTF

SEQ ID NO: 1008 - protein, 11 aa, synthetic construct
  REGION 1..11: note = Non-Selective Anti-CD33 LCDR3
CQQSYSTPPTF

SEQ ID NO: 1009 - protein, 11 aa, synthetic construct [sequence omitted]

SEQ ID NO: 1010 - protein, 10 aa, synthetic construct [sequence omitted]

SEQ ID NO: 1011 - protein, 11 aa, synthetic construct [sequence omitted]

SEQ ID NO: 1012 - protein, 10 aa, synthetic construct [sequence omitted]

SEQ ID NO: 1013 - protein, 11 aa, synthetic construct [sequence omitted]

SEQ ID NO: 1014 - protein, 11 aa, synthetic construct [sequence omitted]

SEQ ID NO: 1015 - protein, 11 aa, synthetic construct [sequence omitted]

SEQ ID NO: 1016 - protein, 11 aa, synthetic construct
  REGION 1..11: note = Non-Selective Anti-CD33 LCDR3
CQQYSYLPVTF

SEQ ID NO: 1017 - protein, 11 aa, synthetic construct [sequence omitted]

SEQ ID NO: 1018 - protein, 11 aa, synthetic construct [sequence omitted]

SEQ ID NO: 1019 - protein, 11 aa, synthetic construct [sequence omitted]

SEQ ID NO: 1020 - protein, 11 aa, synthetic construct [sequence omitted]

SEQ ID NO: 1021 - protein, 11 aa, synthetic construct
  REGION 1..11: note = Non-Selective Anti-CD33 LCDR3
CQQSYSTPPTF

SEQ ID NO: 1022 - protein, 11 aa, synthetic construct
  REGION 1..11: note = Non-Selective Anti-CD33 LCDR3
CQQAYSFPWTF

SEQ ID NO: 1023 - protein, 11 aa, synthetic construct [sequence omitted]

SEQ ID NO: 1024 - protein, 11 aa, synthetic construct [sequence omitted]

SEQ ID NO: 1025 - protein, 11 aa, synthetic construct [sequence omitted]

SEQ ID NO: 1026 - protein, 11 aa, synthetic construct [sequence omitted]

SEQ ID NO: 1027 - protein, 11 aa, synthetic construct [sequence omitted]

SEQ ID NO: 1028 - protein, 11 aa, synthetic construct [sequence omitted]

SEQ ID NO: 1029 - protein, 11 aa, synthetic construct
  REGION 1..11: note = Non-Selective Anti-CD33 LCDR3
CQQSHSLPPTF

SEQ ID NO: 1030 - protein, 11 aa, synthetic construct [sequence omitted]

SEQ ID NO: 1031 - protein, 11 aa, synthetic construct [sequence omitted]

SEQ ID NO: 1032 - protein, 11 aa, synthetic construct [sequence omitted]

SEQ ID NO: 1033 - protein, 11 aa, synthetic construct [sequence omitted]

SEQ ID NO: 1034 - protein, 11 aa, synthetic construct [sequence omitted]

SEQ ID NO: 1035 - protein, 121 aa, synthetic construct
  REGION 1..121: note = Non-Selective Anti-CD33 Full VH
QVQLVQSGAEVKKPGASVKVSCKASGYTFTNYYMHWVRQAPGQGLEWMGWINPNSGDTNYEQKFQGRVTMTRDTSTSTVYMELSSLRSEDTAVYYCARDDRIQLWVPLVFWGQGTLVTVSS

SEQ ID NO: 1036 - protein, 124 aa, synthetic construct
  REGION 1..124: note = Non-Selective Anti-CD33 Full VH
EVQLLESGGGLVQPGGSLRLSCAASGFTFSNSDMNWVRQAPGKGLEWVSYISGTGSTIYYADSVKGRFTISRDNSKNTLYLQMNSLRAEDTAVYYCAKDYDSSYGSGYYGMDVWGQGTTVTVSS

SEQ ID NO: 1037 - protein, 121 aa, synthetic construct
  REGION 1..121: note = Non-Selective Anti-CD33 Full VH
QVQLVQSGAEVKKPGASVKVSCKASGGTFSSYAISWVRQAPGQGLEWMGWMNPNSGNTGYAQKFQGRVTMTRDTSTSTVYMELSSLRSEDTAVYYCAREDYYDSSGNFDYWGQGTLVTVSS

SEQ ID NO: 1038 - protein, 121 aa, synthetic construct
  REGION 1..121: note = Non-Selective Anti-CD33 Full VH
QVQLVQSGAEVKKPGASVKVSCKASGYTFTNHYMHWVRQAPGQGLEWMGIINPSGGSTSYAQKFQGRVTMTRDTSTSTVYMELSSLRSEDTAVYYCASAEVGATHYGMDVWGQGTTVTVSS

SEQ ID NO: 1039 - protein, 126 aa, synthetic construct
  REGION 1..126: note = Non-Selective Anti-CD33 Full VH
QVQLVQSGAEVKKPGASVKVSCKASGYSFTNYDISWVRQAPGQGLEWMGWVNPNSGNTGYAQKFQGRVTMTRDTSTSTVYMELSSLRSEDTAVYYCAKDAPYYYDSSGYYGVFDYWGQGTLVTVSS

SEQ ID NO: 1040 - protein, 122 aa, synthetic construct
  REGION 1..122: note = Non-Selective Anti-CD33 Full VH
QVQLVQSGAEVKKPGASVKVSCKASGYTFTTYDINWVRQAPGQGLEWMGWISGYNGNTGYAQKFQGRVTMTRDTSTSTVYMELSSLRSEDTAVYYCAKDMGYGDYPDAFDIWGQGTMVTVSS

SEQ ID NO: 1041 - protein, 116 aa, synthetic construct
  REGION 1..116: note = Non-Selective Anti-CD33 Full VH
QVQLVQSGAEVKKPGSSVKVSCKASGYSFTTYDINWVRQAPGQGLEWMGRMNPNSGNTGYAQKFQGRVTITADESTSTAYMELSSLRSEDTAVYYCARVVHGMDVWGQGTTVTVSS

SEQ ID NO: 1042 - protein, 120 aa, synthetic construct
  REGION 1..120: note = Non-Selective Anti-CD33 Full VH
QVQLVQSGAEVKKPGASVKVSCKASGGTFSSYAISWVRQAPGQGLEWMGWMNPSSANTGYAQKFQGRVTMTRDTSTSTVYMELSSLRSEDTAVYYCAKDEMELLTAFDIWGQGTMVTVSS

SEQ ID NO: 1043 - protein, 117 aa, synthetic construct
  REGION 1..117: note = Non-Selective Anti-CD33 Full VH
EVQLLESGGGLVQPGGSLRLSCAASGFTFRSYWMTWVRQAPGKGLEWVSVISGSGDNTYYADSVKGRFTISRDNSKNTLYLQMNSLRAEDTAVYYCARETTWGMDVWGQGTTVTVSS

SEQ ID NO: 1044 - protein, 128 aa, synthetic construct
  REGION 1..128: note = Non-Selective Anti-CD33 Full VH
QVQLVQSGAEVKKPGASVKVSCKASGGSFSSSAINWVRQAPGQGLEWMGWMNPNSGNTGYAQKFQGRVTMTRDTSTSTVYMELSSLRSEDTAVYYCARDRGIAVAGASPYYYYGMDVWGQGTTVTVSS

SEQ ID NO: 1045 - protein, 121 aa, synthetic construct
  REGION 1..121: note = Non-Selective Anti-CD33 Full VH
QVQLVQSGAEVKKPGSSVKVSCKASGYTFSDYHIHWVRQAPGQGLEWMGWMNPNSGNTGYAQKFQGRVTITADESTSTAYMELSSLRSEDTAVYYCARTHSSGYYYWFDPWGQGTLVTVSS

SEQ ID NO: 1046 - protein, 119 aa, synthetic construct
  REGION 1..119: note = Non-Selective Anti-CD33 Full VH
QVQLVQSGAEVKKPGASVKVSCKASGATRSWMHWVRQAPGQGLEWMGIINPSGDSTSYAQKFQGRVTMTRDTSTSTVYMELSSLRSEDTAVYYCAKEPYSSSPYYFDYWGQGTLVTVSS

SEQ ID NO: 1047 - protein, 122 aa, synthetic construct
  REGION 1..122: note = Non-Selective Anti-CD33 Full VH
EVQLLESGGGLVQPGGSLRLSCAASGFTFSSYGVHWVRQAPGKGLEWVSAISGDGGDTYYADSVKGRFTISRDNSKNTLYLQMNSLRAEDTAVYYCARDTWDYSNYGGIDYWGQGTLVTVSS

SEQ ID NO: 1048 - protein, 126 aa, synthetic construct
  REGION 1..126: note = Non-Selective Anti-CD33 Full VH
EVQLLESGGGLVQPGGSLRLSCAASGFTFSNAWMSWVRQAPGKGLEWVSGIGGSGGTIYYADSVKGRFTISRDNSKNTLYLQMNSLRAEDTAVYYCAREVAAPLHPFGYYYYMDVWGKGTTVTVSS

SEQ ID NO: 1049 - protein, 119 aa, synthetic construct
  REGION 1..119: note = Non-Selective Anti-CD33 Full VH
QVQLVQSGAEVKKPGASVKVSCKASGYTFTGYYMHWVRQAPGQGLEWMGWMNPDSGDTNYAQNFQGRVTMTRDTSTSTVYMELSSLRSEDTAVYYCATTRQPHYGMDVWGQGTTVTVSS

SEQ ID NO: 1050 - protein, 124 aa, synthetic construct
  REGION 1..124: note = Non-Selective Anti-CD33 Full VH
EVQLLESGGGLVQPGGSLRLSCAASGFTFSSSWMHWVRQAPGKGLEWVAVISYDGSEEYYADSVKGRFTISRDNSKNTLYLQMNSLRAEDTAVYYCARLTDYGDYVLGRYLSDWGQGTLVTVSS

SEQ ID NO: 1051 - protein, 120 aa, synthetic construct
  REGION 1..120: note = Non-Selective Anti-CD33 Full VH
EVQLLESGGGLVQPGGSLRLSCAASGFTFNNAWMTWVRQAPGKGLEWVAVISYDGSNKYYADSVKGRFTISRDNSKNTLYLQMNSLRAEDTAVYYCARMAVAGKGAFDIWGQGTMVTVSS

SEQ ID NO: 1052 - protein, 125 aa, synthetic construct
  REGION 1..125: note = Non-Selective Anti-CD33 Full VH
QVQLVQSGAEVKKPGASVKVSCKASGYTFTGYYMHWVRQAPGQGLEWMGRIKPNSGGTDYAQKFQGRVTMTRDTSTSTVYMELSSLRSEDTAVYYCARGAYSGSYYGPIEYFQHWGQGTLVTVSS

SEQ ID NO: 1053 - protein, 127 aa, synthetic construct
  REGION 1..127: note = Non-Selective Anti-CD33 Full VH
QVQLVQSGAEVKKPGSSVKVSCKASGYTFTDYYIHWVRQAPGQGLEWMGGIIPIFGTANYAQKFQGRVTITADESTSTAYMELSSLRSEDTAVYYCAREPLWFGESSPHDYYGMDVWGQGTLVTVSS

SEQ ID NO: 1054 - protein, 122 aa, synthetic construct
  REGION 1..122: note = Non-Selective Anti-CD33 Full VH
QVQLVQSGAEVKKPGASVKVSCKASGYTFTNYDINWVRQAPGQGLEWMGWMNPNSGNTGLVEKFQGRVTMTRDTSTSTVYMELSSLRSEDTAVYYCARGWGHGYGDYKFDYWGQGTLVTVSS

SEQ ID NO: 1055 - protein, 119 aa, synthetic construct
  REGION 1..119: note = Non-Selective Anti-CD33 Full VH
QVQLVQSGAEVKKPGSSVKVSCKASGYTFTTYGISWVRQAPGQGLEWMGWMNPNSGNTGYAQKFQGRVTITADESTSTAYMELSSLRSEDTAVYYCAREGGDGDYPDYWGQGTLVTVSS

SEQ ID NO: 1056 - protein, 127 aa, synthetic construct
  REGION 1..127: note = Non-Selective Anti-CD33 Full VH
QVQLVQSGAEVKKPGASVKVSCKASGYTFTDYYVHWVRQAPGQGLEWMGWMNPNSGNTGYAQKFQGRVTMTRDTSTSTVYMELSSLRSEDTAVYYCARDFIWVEGYLASPPPRFDYWGQGTLVTVSS

SEQ ID NO: 1057 - protein, 116 aa, synthetic construct
  REGION 1..116: note = Non-Selective Anti-CD33 Full VH
QVQLVQSGAEVKKPGASVKVSCKASGGTFTSYGISWVRQAPGQGLEWMGWINPNTGVTNYAQDFQGRVTMTRDTSTSTVYMELSSLRSEDTAVYYCANEQGGFDYWGQGTLVTVSS

SEQ ID NO: 1058 - protein, 119 aa, synthetic construct
  REGION 1..119: note = Non-Selective Anti-CD33 Full VH
QVQLVQSGAEVKKPGSSVKVSCKASGSTLTGYDIHWVRQAPGQGLEWMGGIIPFLGTASYAQEFQGRVTITADESTSTAYMELSSLRSEDTAVYYCARGGGSGYDLDYWGQGTLVTVSS

SEQ ID NO: 1059 - protein, 124 aa, synthetic construct
  REGION 1..124: note = Non-Selective Anti-CD33 Full VH
QVQLVQSGAEVKKPGSSVKVSCKASGGTFSSYDINWVRQAPGQGLEWMGGLIPVFGTTHYAQNFQGRVTITADESTSTAYMELSSLRSEDTAVYYCATGLGVTTSNYYYGMDVWGQGTLVTVSS

SEQ ID NO: 1060 - protein, 119 aa, synthetic construct
  REGION 1..119: note = Non-Selective Anti-CD33 Full VH
QVQLVQSGAEVKKPGASVKVSCKASGGTFSKYAISWVRQAPGQGLEWMGWMNPNSGNTGYAQKFQGRVTMTRDTSTSTVYMELSSLRSEDTAVYYCARDQGLTGYFDLWGRGTLVTVSS

SEQ ID NO: 1061 - protein, 117 aa, synthetic construct
  REGION 1..117: note = Non-Selective Anti-CD33 Full VH
QVQLVQSGAEVKKPGASVKVSCKASGYTFTGYYMHWVRQAPGQGLEWMGIISPSGGSPTYAQKFQGRVTMTRDTSTSTVYMELSSLRSEDTAVYYCAREGNGGMDVWGQGTTVTVSS

SEQ ID NO: 1062 - protein, 124 aa, synthetic construct
  REGION 1..124: note = Non-Selective Anti-CD33 Full VH
EVQLLESGGGLVQPGGSLRLSCAASGFTFSNYAMAWVRQAPGKGLEWVSAISGSGGGTYYADSVKGRFTISRDNSKNTLYLQMNSLRAEDTAVYYCAREGGYDPDYYYYGMDVWGQGTTVTVSS

SEQ ID NO: 1063 - protein, 120 aa, synthetic construct
  REGION 1..120: note = Non-Selective Anti-CD33 Full VH
EVQLLESGGGLVQPGGSLRLSCAASGFTFGDYPMSWVRQAPGKGLEWVAGISYDGLNEHYADSVKGRFTISRDNSKNTLYLQMNSLRAEDTAVYYCARDRDSGPSGFQHWGQGTLVTVSS

SEQ ID NO: 1064 - protein, 120 aa, synthetic construct
  REGION 1..120: note = Non-Selective Anti-CD33 Full VH
EVQLVESGGGLVKPGGSLRLSCAASGFTISNAWMSWVRQAPGKGLEWVAHIWNDGSQKYYADSVKGRFTISRDDSKNTLYLQMNSLKTEDTAVYYCARDGALGVGPDDYWGQGTLVTVSS

SEQ ID NO: 1065 - protein, 126 aa, synthetic construct
  REGION 1..126: note = Non-Selective Anti-CD33 Full VH
QVQLVQSGAEVKKPGASVKVSCKASGNTLTNDHIHWVRQAPGQGLEWMGWMNPNSGDTGYAQKFQGRVTMTRDTSTSTVYMELSSLRSEDTAVYYCARAGVDTAMVTYYYYGMDVWGQGTTVTVSS

SEQ ID NO: 1066 - protein, 124 aa, synthetic construct
  REGION 1..124: note = Non-Selective Anti-CD33 Full VH
QVQLVQSGAEVKKPGASVKVSCKASGYTFTTYYMHWVRQAPGQGLEWMGWMNPNSGNTGYAQKFQGRVTMTRDTSTSTVYMELSSLRSEDTAVYYCARGHKVDSGYDPYGMDVWGQGTTVTVSS

SEQ ID NO: 1067 - protein, 122 aa, synthetic construct
  REGION 1..122: note = Non-Selective Anti-CD33 Full VH
QVQLVQSGAEVKKPGASVKVSCKASGDSFTDYYIHWVRQAPGQGLEWMGWMNPNSGNTGYAQQFQGRVTMTRDTSTSTVYMELSSLRSEDTAVYYCARDREYSSSSRYFDLWGRGTLVTVSS

SEQ ID NO: 1068 - protein, 122 aa, synthetic construct
  REGION 1..122: note = Non-Selective Anti-CD33 Full VH
QVQLVQSGAEVKKPGASVKVSCKASGYTFTDYWLHWVRQAPGQGLEWMGTINPSGGSTSYSHKFQGRVTMTRDTSTSTVYMELSSLRSEDTAVYYCAKEEEGFWSGYAFDYWGQGTLVTVSS

SEQ ID NO: 1069 - protein, 122 aa, synthetic construct
  REGION 1..122: note = Non-Selective Anti-CD33 Full VH
EVQLLESGGGLVQPGGSLRLSCAASGFILGNAWMHWVRQAPGKGLEWVASVSGDGSDENYADSVKGRFTISRDNSKNTLYLQMNSLRAEDTAVYYCARDTHDYGDYAPFDYWGQGTLVTVSS

SEQ ID NO: 1070 - protein, 118 aa, synthetic construct
  REGION 1..118: note = Non-Selective Anti-CD33 Full VH
EVQLVESGGGLVKPGGSLRLSCAASGFTFSSYWMHWVRQAPGKGLEWVAVIWYDGSNKYYADSVKGRFTISRDDSKNTLYLQMNSLKTEDTAVYYCVRDGARSGMDVWGQGTTVTVSS

SEQ ID NO: 1071 - protein, 119 aa, synthetic construct
  REGION 1..119: note = Non-Selective Anti-CD33 Full VH
QVQLVQSGAEVKKPGASVKVSCKASGYSFTTYDIHWVRQAPGQGLEWMGWMNPNSGNTGYAQKFQGRVTMTRDTSTSTVYMELSSLRSEDTAVYYCATDHWVLGGFDYWGQGTLVTVSS

SEQ ID NO: 1072 - protein, 123 aa, synthetic construct
  REGION 1..123: note = Non-Selective Anti-CD33 Full VH
EVQLLESGGGLVQPGGSLRLSCAASGFTFTTYDMHWVRQAPGKGLEWVAGINWNSVIIDYADSVKGRFTISRDNSKNTLYLQMNSLRAEDTAVYYCAKDLLYYYDSIGAFDIWGQGTMVTVSS

SEQ ID NO: 1073 - protein, 123 aa, synthetic construct
  REGION 1..123: note = Non-Selective Anti-CD33 Full VH
QVQLVQSGAEVKKPGASVKVSCKASGYTFTNHHMHWVRQAPGQGLEWMGMINPSGGSTSYAQKFQGRVTMTRDTSTSTVYMELSSLRSEDTAVYYCARGRPVDIVATYYFDYWGQGTLVTVSS

SEQ ID NO: 1074 - protein, 124 aa, synthetic construct
  REGION 1..124: note = Non-Selective Anti-CD33 Full VH
QVQLVQSGAEVKKPGASVKVSCKASGYTFTNYYIHWVRQAPGQGLEWLGWTNPINGDTGSAQKFQGRVTMTRDTSTSTVYMELSSLRSEDTAVYYCAKEGQLAWADYYYYMDVWGKGTTVTVSS

SEQ ID NO: 1075 - protein, 117 aa, synthetic construct
  REGION 1..117: note = Non-Selective Anti-CD33 Full VH
EVQLVESGGGLVKPGGSLRLSCAASGFSLRNYWMHWVRQAPGKGLEWVSGISGSGGSTYYADSVKGRFTISRDDSKNTLYLQMNSLKTEDTAVYYCARDYTGVVDYWGQGTLVTVSS

SEQ ID NO: 1076 - protein, 124 aa, synthetic construct
  REGION 1..124: note = Non-Selective Anti-CD33 Full VH
QVQLVQSGAEVKKPGASVKVSCKASGGTFSNYAISWVRQAPGQGLEWMAWMNPNSGNTGYAQKFQGRVTMTRDTSTSTVYMELSSLRSEDTAVYYCARDGFIGFGELFSAFDIWGQGTMVTVSS

SEQ ID NO: 1077 - protein, 129 aa, synthetic construct
  REGION 1..129: note = Non-Selective Anti-CD33 Full VH
QVQLVQSGAEVKKPGASVKVSCKASGGTFSNYAINWVRQAPGQGLEWMGWINPNSGGTDSAQKFQGRVTMTRDTSTSTVYMELSSLRSEDTAVYYCARDSSLALSYGGNSEYYYGMDVWGQGTTVTVSS

SEQ ID NO: 1078 - protein, 121 aa, synthetic construct
  REGION 1..121: note = Non-Selective Anti-CD33 Full VH
EVQLLESGGGLVQPGGSLRLSCAASGFTFNNYGMHWVRQAPGKGLEWVSAISGSGGSTYYADSVKGRFTISRDNSKNTLYLQMNSLRAEDTAVYYCAREYMQQPHGGMDVWGQGTTVTVSS

SEQ ID NO: 1079 - protein, 120 aa, synthetic construct
  REGION 1..120: note = Non-Selective Anti-CD33 Full VH
EVQLLESGGGLVQPGGSLRLSCAASGFTFSSSWMHWVRQAPGKGLEWVSAISSSGDATYYADSVKGRFTISRDNSKNTLYLQMNSLRAEDTAVYYCAKFSDGGAGDSDYWGQGTLVTVSS

SEQ ID NO: 1080 - protein, 121 aa, synthetic construct
  REGION 1..121: note = Non-Selective Anti-CD33 Full VH
QVQLVQSGAEVKKPGASVKVSCKASGYTFDSYLLHWVRQAPGQGLEWMGMINPSGAGTTYAQKFQGRVTMTRDTSTSTVYMELSSLRSEDTAVYYCAKEGSIAAGYYFDSWGQGTLVTVSS

SEQ ID NO: 1081 - protein, 121 aa, synthetic construct
  REGION 1..121: note = Non-Selective Anti-CD33 Full VH
QVQLVQSGAEVKKPGASVKVSCKASGYSFTTYGITWVRQAPGQGLEWMGWINPNSGNAGYAQKFQGRVTMTRDTSTSTVYMELSSLRSEDTAVYYCASDLAGYSSGYFDLWGRGTLVTVSS

SEQ ID NO: 1082 - protein, 122 aa, synthetic construct
  REGION 1..122: note = Non-Selective Anti-CD33 Full VH
QVQLVQSGAEVKKPGASVKVSCKASGDTLTNHFVHWVRQAPGQGLEWMGWMNPNSGNTGYAQKFQGRVTMTRDTSTSTVYMELSSLRSEDTAVYYCARDPQMGAVAGGFDYWGQGTLVTVSS

SEQ ID NO: 1083 - protein, 121 aa, synthetic construct
  REGION 1..121: note = Non-Selective Anti-CD33 Full VH
QVQLVQSGAEVKKPGASVKVSCKASGYTFTDYYIHWVRQAPGQGLEWMGMVNPSGGSANYAQKFQGRVTMTRDTSTSTVYMELSSLRSEDTAVYYCAKDSAWQEPYYFDYWGQGTLVTVSS

SEQ ID NO: 1084 - protein, 119 aa, synthetic construct
  REGION 1..119: note = Non-Selective Anti-CD33 Full VH
QVQLVQSGAEVKKPGASVKVSCKASGYTFSSYDMHWVRQAPGQGLEWMGVINPGGGYTNYAQKFQGRVTMTRDTSTSTVYMELSSLRSEDTAVYYCARDEGWELLLDYWGQGTLVTVSS

SEQ ID NO: 1085 - protein, 120 aa, synthetic construct
  REGION 1..120: note = Non-Selective Anti-CD33 Full VH
QVQLVQSGAEVKKPGASVKVSCKASGYTLSDHDINWVRQAPGQGLEWMGWMNPSTGNTGYAQKFQGRVTMTRDTSTSTVYMELSSLRSEDTAVYYCERDQLRFGAWFDPWGQGTLVTVSS

SEQ ID NO: 1086 - protein, 116 aa, synthetic construct
  REGION 1..116: note = Non-Selective Anti-CD33 Full VH
EVQLVESGGGLVKPGGSLRLSCAASGITVSSSWMHWVRQAPGKGLEWVSAIGTGGGTHYADSVKGRFTISRDDSKNTLYLQMNSLKTEDTAVYYCARDQGGQIDHWGQGTLVTVSS

SEQ ID NO: 1087 - protein, 123 aa, synthetic construct
  REGION 1..123: note = Non-Selective Anti-CD33 Full VH
QVQLVQSGAEVKKPGASVKVSCKASGGTFSSYAISWVRQAPGQGLEWMGVISPNGDTTVYAQKFQGRVTMTRDTSTSTVYMELSSLRSEDTAVYYCARDRGVAHSYYYGMDVWGQGTLVTVSS

SEQ ID NO: 1088 - protein, 122 aa, synthetic construct
  REGION 1..122: note = Non-Selective Anti-CD33 Full VH
EVQLLESGGGLVQPGGSLRLSCAASGFTFSSYWMHWVRQAPGKGLEWVAVISYDGSDKYYADSVKGRFTISRDNSKNTLYLQMNSLRAEDTAVYYCARGLGGTTGTADFDYWGQGTLVTVSS

SEQ ID NO: 1089 - protein, 123 aa, synthetic construct
  REGION 1..123: note = Non-Selective Anti-CD33 Full VH
QVQLVQSGAEVKKPGASVKVSCKASGYTFTGYYMHWVRQAPGQGLEWMGWMNANSGNTGFAQKFQGRVTMTRDTSTSTVYMELSSLRSEDTAVYYCARDSSSWLSGGGWFDPWGQGTLVTVSS

SEQ ID NO: 1090 - protein, 108 aa, synthetic construct
  REGION 1..108: note = Non-Selective Anti-CD33 Full VL
DIQMTQSPSSLSASVGDRVTITCRASQGISNYLAWYQQKPGKAPKLLIYSASNLQSGVPSRFSGSGSGTDFTLTISSLQPEDFATYYCQQSFSTPFTFGQGTKLEIKR

SEQ ID NO: 1091 - protein, 108 aa, synthetic construct
  REGION 1..108: note = Non-Selective Anti-CD33 Full VL
DIQMTQSPSSLSASVGDRVTITCRASQSIYNYLNWYQQKPGKAPKLLIYAASNLQSGVPSRFSGSGSGTDFTLTISSLQPEDFATYYCQQYGNAPLTFGQGTKVEIKR

SEQ ID NO: 1092 - protein, 108 aa, synthetic construct
  REGION 1..108: note = Non-Selective Anti-CD33 Full VL
DIQMTQSPSSLSASVGDRVTITCQASHDINIHLNWYQQKPGKAPKLLIYDASNLETGVPSRFSGSGSGTDFTLTISSLQPEDFATYYCQQAYSLPWTFGQGTKVEIKR

SEQ ID NO: 1093 - protein, 112 aa, synthetic construct
  REGION 1..112: note = Non-Selective Anti-CD33 Full VL
DIVMTQSPLSLPVTPGEPASISCRSSQSLLHSNGYNYLDWYLQKPGQSPQLLIYAASSLQSGVPDRFSGSGSGTDFTLKISRVEAEDVGVYYCMQALHPPTFGQGTKVEIKR

SEQ ID NO: 1094 - protein, 113 aa, synthetic construct
  REGION 1..113: note = Non-Selective Anti-CD33 Full VL
DIVMTQSPLSLPVTPGEPASISCRSSQSLLHSNGYNYLDWYLQKPGQSPQLLIYAASSLQSGVPDRFSGSGSGTDFTLKISRVEAEDVGVYYCMQALQTPLTFGQGTRLEIKR

SEQ ID NO: 1095 - protein, 113 aa, synthetic construct
  REGION 1..113: note = Non-Selective Anti-CD33 Full VL
DIVMTQSPLSLPVTPGEPASISCRSSQSLLHSNGYNYLDWYLQKPGQSPQLLIYAASTLQSGVPDRFSGSGSGTDFTLKISRVEAEDVGVYYCMQALQIPITFGQGTKVEIKR

SEQ ID NO: 1096 - protein, 113 aa, synthetic construct
  REGION 1..113: note = Non-Selective Anti-CD33 Full VL
DIVMTQSPLSLPVTPGEPASISCRSSQSLLHSNGYNYLDWYLQKPGQSPQLLIYLGSLRAPGVPDRFSGSGSGTDFTLKISRVEAEDVGVYYCMQALQTPWTFGQGTKVEIKR

SEQ ID NO: 1097 - protein, 108 aa, synthetic construct
  REGION 1..108: note = Non-Selective Anti-CD33 Full VL
DIQMTQSPSSLSASVGDRVTITCRASQSIGSWLAWYQQKPGKAPKLLIYGVSTLHSGVPSRFSGSGSGTDFTLTISSLQPEDFATYYCQQSYSTPPTFGQGTKLEIKR

SEQ ID NO: 1098 - protein, 108 aa, synthetic construct
  REGION 1..108: note = Non-Selective Anti-CD33 Full VL
DIQMTQSPSSLSASVGDRVTITCRASQSISSYLNWYQQKPGKAPKLLIYDASNLETGVPSRFSGSGSGTDFTLTISSLQPEDFATYYCQQSSIIPLTFGGGTKVEIKR

SEQ ID NO: 1099 - protein, 108 aa, synthetic construct
  REGION 1..108: note = Non-Selective Anti-CD33 Full VL
DIQMTQSPSSLSASVGDRVTITCRASQDIGSYLAWYQQKPGKAPKLLIYAASSLQSGVPSRFSGSGSGTDFTLTISSLQPEDFATYYCHQSYSTPFTFGQGTKLEIKR

SEQ ID NO: 1100 - protein, 108 aa, synthetic construct
  REGION 1..108: note = Non-Selective Anti-CD33 Full VL
DIQMTQSPSSLSASVGDRVTITCRASQGISNNLNWYQQKPGKAPKLLIYQASNKDTGVPSRFSGSGSGTDFTLTISSLQPEDFATYYCQQSYSSPPTFGQGTKVEIKR

SEQ ID NO: 1101 - protein, 108 aa, synthetic construct
  REGION 1..108: note = Non-Selective Anti-CD33 Full VL
DIQMTQSPSSLSASVGDRVTITCRASQSISSWLAWYQQKPGKAPKLLIYGASSLQSGVPSRFSGSGSGTDFTLTISSLQPEDFATYYCQQSYTTPITFGQGTRLEIKR

SEQ ID NO: 1102 - protein, 108 aa, synthetic construct
  REGION 1..108: note = Non-Selective Anti-CD33 Full VL
DIQMTQSPSSLSASVGDRVTITCRASQNINTFLNWYQQKPGKAPKLLIYAASTLQSGVPSRFSGSGSGTDFTLTISSLQPEDFATYYCQQYDSFPLTFGGGTKVEIKR

SEQ ID NO: 1103 - protein, 113 aa, synthetic construct
  REGION 1..113: note = Non-Selective Anti-CD33 Full VL
DIVMTQSPLSLPVTPGEPASISCRSSQSLLHSNGYNYLDWYLQKPGQSPQLLIYLGSNRASGVPDRFSGSGSGTDFTLKISRVEAEDVGVYYCMQALETPITFGQGTRLEIKR

SEQ ID NO: 1104 - protein, 112 aa, synthetic construct
  REGION 1..112: note = Non-Selective Anti-CD33 Full VL
DIVMTQSPLSLPVTPGEPASISCRSSQSLLHSNGYNYLDWYLQKPGQSPQLLIYLGSNRASGVPDRFSGSGSGTDFTLKISRVEAEDVGVYYCMQATHWPTFGQGTRLEIKR

SEQ ID NO: 1105 - protein, 108 aa, synthetic construct
  REGION 1..108: note = Non-Selective Anti-CD33 Full VL
DIQMTQSPSSLSASVGDRVTITCRASQGISSYLAWYQQKPGKAPKLLIYAASSLQSGVPSRFSGSGSGTDFTLTISSLQPEDFATYYCQQSYSIPPTFGQGTKLEIKR

SEQ ID NO: 1106 - protein, 108 aa, synthetic construct
  REGION 1..108: note = Non-Selective Anti-CD33 Full VL
DIQMTQSPSSLSASVGDRVTITCRASQSIYSWLAWYQQKPGKAPKLLIYAASTLQSGVPSRFSGSGSGTDFTLTISSLQPEDFATYYCQQTYSTPVTFGQGTKVEIKR

SEQ ID NO: 1107 - protein, 108 aa, synthetic construct
  REGION 1..108: note = Non-Selective Anti-CD33 Full VL
DIQMTQSPSSLSASVGDRVTITCRASQSISWFLNWYQQKPGKAPKLLIYAASSLQNGVPSRFSGSGSGTDFTLTISSLQPEDFATYYCQQYGSFPPTFGGGTKVEIKR

SEQ ID NO: 1108 - protein, 108 aa, synthetic construct
  REGION 1..108: note = Non-Selective Anti-CD33 Full VL
DIQMTQSPSSLSASVGDRVTITCQASQDISNYLNWYQQKPGKAPKLLIYAASTLQSGVPSRFSGSGSGTDFTLTISSLQPEDFATYYCQQSYSSPPTFGQGTKVEIKR

SEQ ID NO: 1109 - protein, 114 aa, synthetic construct
  REGION 1..114: note = Non-Selective Anti-CD33 Full VL
DIVMTQSPDSLAVSLGERATINCRSSQSLLYSSNNLNYLAWYQQKPGQPPKLLIYWASTRESGVPDRFSGSGSGTDFTLTISSLQAEDVAVYYCQQYYSNPLTFGQGTKVEIKR

SEQ ID NO: 1110 - protein, 109 aa, synthetic construct
  REGION 1..109: note = Non-Selective Anti-CD33 Full VL
EIVMTQSPATLSVSPGERATLSCRASQSISSSSLAWYQQKPGQAPRLLIYGASTRATGIPARFSGSGSGTEFTLTISSLQSEDFAVYYCQQYETAPYTFGQGTKLEIKR

SEQ ID NO: 1111 - protein, 108 aa, synthetic construct
  REGION 1..108: note = Non-Selective Anti-CD33 Full VL
DIQMTQSPSSLSASVGDRVTITCRASQRIGNWLAWYQQKPGKAPKLLIYAASSLQSGVPSRFSGSGSGTDFTLTISSLQPEDFATYYCQQSYSTPLTFGQGTKLEIKR

SEQ ID NO: 1112 - protein, 109 aa, synthetic construct
  REGION 1..109: note = Non-Selective Anti-CD33 Full VL
EIVMTQSPATLSVSPGERATLSCRASQSVAGSYLAWYQQKPGQAPRLLIYGASTRATGIPARFSGSGSGTEFTLTISSLQSEDFAVYYCQQYYSTPLTFGGGTKVEIKR

SEQ ID NO: 1113 - protein, 108 aa, synthetic construct
  REGION 1..108: note = Non-Selective Anti-CD33 Full VL
DIQMTQSPSSLSASVGDRVTITCRSSESISSWLAWYQQKPGKAPKLLIYSASTLQSGVPSRFSGSGSGTDFTLTISSLQPEDFATYYCQQSYSTPVTFGQGTRLEIKR

SEQ ID NO: 1114 - protein, 108 aa, synthetic construct
  REGION 1..108: note = Non-Selective Anti-CD33 Full VL
DIQMTQSPSSLSASVGDRVTITCRASQGIRNDIGWYQQKPGKAPKLLIYAASTLQSGVPSRFSGSGSGTDFTLTISSLQPEDFATYYCQQTYMMPYTFGQGTKLEIKR

SEQ ID NO: 1115 - protein, 108 aa, synthetic construct
  REGION 1..108: note = Non-Selective Anti-CD33 Full VL
DIQMTQSPSSLSASVGDRVTITCRASQSIGNWLAWYQQKPGKAPKLLIYKASSLESGVPSRFSGSGSGTDFTLTISSLQPEDFATYYCQQSYNTPPTFGPGTKVDIKR

SEQ ID NO: 1116 - protein, 113 aa, synthetic construct
  REGION 1..113: note = Non-Selective Anti-CD33 Full VL
DIVMTQSPLSLPVTPGEPASISCRSSQSLLHSNGYNYLDWYLQKPGQSPQLLIYLGSNRASGVPDRFSGSGSGTDFTLKISRVEAEDVGVYYCMQALQTPYTFGQGTKLEIKR

SEQ ID NO: 1117 - protein, 108 aa, synthetic construct
  REGION 1..108: note = Non-Selective Anti-CD33 Full VL
DIQMTQSPSSLSASVGDRVTITCRASQSISSYLNWYQQKPGKAPKLLIYATSRLQSGVPSRFSGSGSGTDFTLTISSLQPEDFATYYCQQGFNFPPTFGGGTKVEIKR

SEQ ID NO: 1118 - protein, 108 aa, synthetic construct
  REGION 1..108: note = Non-Selective Anti-CD33 Full VL
DIQMTQSPSSLSASVGDRVTITCRASQTIGTWLAWYQQKPGKAPKLLIYDASSLESGVPSRFSGSGSGTDFTLTISSLQPEDFATYYCQQSYSTPPTFGQGTKVEIKR

SEQ ID NO: 1119 - protein, 113 aa, synthetic construct
  REGION 1..113: note = Non-Selective Anti-CD33 Full VL
DIVMTQSPLSLPVTPGEPASISCRSSQSLLHSNGYNYLDWYLQKPGQSPQLLIYAASSLQSGVPDRFSGSGSGTDFTLKISRVEAEDVGVYYCMQGLQTPHTFGGGTKVEIKR

SEQ ID NO: 1120 - protein, 112 aa, synthetic construct
  REGION 1..112: note = Non-Selective Anti-CD33 Full VL
DIVMTQSPLSLPVTPGEPASISCRSSQSLLHSNGYNYLDWYLQKPGQSPQLLIYMGSNRASGVPDRFSGSGSGTDFTLKISRVEAEDVGVYYCMQALETPTFGQGTRLEIKR

SEQ ID NO: 1121 - protein, 108 aa, synthetic construct
  REGION 1..108: note = Non-Selective Anti-CD33 Full VL
DIQMTQSPSSLSASVGDRVTITCRASQSIGTYLHWYQQKPGKAPKLLIYAISTLQNGVPSRFSGSGSGTDFTLTISSLQPEDFATYYCQQSYSPPLTFGGGTKVEIKR

SEQ ID NO: 1122 - protein, 107 aa, synthetic construct
  REGION 1..107: note = Non-Selective Anti-CD33 Full VL
DIQMTQSPSSLSASVGDRVTITCRASQNIGNWLAWYQQKPGKAPKLLIYAASTLQSGVPSRFSGSGSGTDFTLTISSLQPEDFATYYCQQSYNSITFGPGTKVDIKR

SEQ ID NO: 1123 - protein, 108 aa, synthetic construct
  REGION 1..108: note = Non-Selective Anti-CD33 Full VL
DIQMTQSPSSLSASVGDRVTITCRASQSISSYLNWYQQKPGKAPKLLIYAASSLQSGVPSRFSGSGSGTDFTLTISSLQPEDFATYYCQQSYSTPLTFGQGTKVEIKR

SEQ ID NO: 1124 - protein, 108 aa, synthetic construct
  REGION 1..108: note = Non-Selective Anti-CD33 Full VL
DIQMTQSPSSLSASVGDRVTITCQASQDINNYLNWYQQKPGKAPKLLIYAASNLQSGVPSRFSGSGSGTDFTLTISSLQPEDFATYYCQQTYSFPLTFGGGTKVEIKR

SEQ ID NO: 1125 - protein, 108 aa, synthetic construct
  REGION 1..108: note = Non-Selective Anti-CD33 Full VL
EIVMTQSPATLSVSPGERATLSCRASQSVSTYVAWYQQKPGQAPRLLIYGASTRATGIPARFSGSGSGTEFTLTISSLQSEDFAVYYCQQYYDTPLTFGGGTKVEIKR

SEQ ID NO: 1126 - protein, 108 aa, synthetic construct
  REGION 1..108: note = Non-Selective Anti-CD33 Full VL
DIQMTQSPSSLSASVGDRVTITCQASQDISNYLNWYQQKPGKAPKLLIYAASTLQSGVPSRFSGSGSGTDFTLTISSLQPEDFATYYCQQYSYLPVTFGQGTKLEIKR

SEQ ID NO: 1127 - protein, 108 aa, synthetic construct
  REGION 1..108: note = Non-Selective Anti-CD33 Full VL
DIQMTQSPSSLSASVGDRVTITCRASQSISTWLAWYQQKPGKAPKLLIYAASSLQSGVPSRFSGSGSGTDFTLTISSLQPEDFATYYCQQSDTLPLTFGGGTKVEIKR

SEQ ID NO: 1128 - protein, 108 aa, synthetic construct
  REGION 1..108: note = Non-Selective Anti-CD33 Full VL
DIQMTQSPSSLSASVGDRVTITCQASQDIRNFLNWYQQKPGKAPKLLIYGASTLHSGVPSRFSGSGSGTDFTLTISSLQPEDFATYYCQQSYSTPLTFGGGTKVEIKR

SEQ ID NO: 1129 - protein, 108 aa, synthetic construct
  REGION 1..108: note = Non-Selective Anti-CD33 Full VL
DIQMTQSPSSLSASVGDRVTITCRASQGISSALAWYQQKPGKAPKLLIYAASSLQSGVPSRFSGSGSGTDFTLTISSLQPEDFATYYCQQSYSTPLTFGGGTKVEIKR

SEQ ID NO: 1130 - protein, 108 aa, synthetic construct; identical to SEQ ID NO: 331
  REGION 1..108: note = Non-Selective Anti-CD33 Full VL

SEQ ID NO: 1131 - protein, 108 aa, synthetic construct
  REGION 1..108: note = Non-Selective Anti-CD33 Full VL
DIQMTQSPSSLSASVGDRVTITCRASQSIGTWLAWYQQKPGKAPKLLIYGATRLLSGVPSRFSGSGSGTDFTLTISSLQPEDFATYYCQQSYSTPPTFGQGTKLEIKR

SEQ ID NO: 1132 - protein, 108 aa, synthetic construct
  REGION 1..108: note = Non-Selective Anti-CD33 Full VL
DIQMTQSPSSLSASVGDRVTITCQASQDISDHLNWYQQKPGKAPKLLIYGASTLQSGVPSRFSGSGSGTDFTLTISSLQPEDFATYYCQQAYSFPWTFGQGTKLEIKR

SEQ ID NO: 1133 - protein, 108 aa, synthetic construct
  REGION 1..108: note = Non-Selective Anti-CD33 Full VL
EIVMTQSPATLSVSPGERATLSCRASQSVNSYLAWYQQKPGQAPRLLIYGASTRATGIPARFSGSGSGTEFTLTISSLQSEDFAVYYCQQYGSSPLSFGGGTKVEIKR

SEQ ID NO: 1134 - protein, 108 aa, synthetic construct
  REGION 1..108: note = Non-Selective Anti-CD33 Full VL
DIQMTQSPSSLSASVGDRVTITCRASQGISSYLAWYQQKPGKAPKLLIYTASSLQSGVPSRFSGSGSGTDFTLTISSLQPEDFATYYCQQYDNLPITFGQGTRLEIKR

SEQ ID NO: 1135 - protein, 108 aa, synthetic construct
  REGION 1..108: note = Non-Selective Anti-CD33 Full VL
DIQMTQSPSSLSASVGDRVTITCRASQSIDSWLAWYQQKPGKAPKLLIYAASSLQSGVPSRFSGSGSGTDFTLTISSLQPEDFATYYCQQSYTTPITFGGGTKVEIKR

SEQ ID NO: 1136 - protein, 114 aa, synthetic construct
  REGION 1..114: note = Non-Selective Anti-CD33 Full VL
DIVMTQSPDSLAVSLGERATINCKSSQSVLYGSNNKNYLAWYQQKPGQPPKLLIYWASTRESGVPDRFSGSGSGTDFTLTISSLQAEDVAVYYCQQYYSTPLTFGGGTKVEIKR

SEQ ID NO: 1137 - protein, 108 aa, synthetic construct
  REGION 1..108: note = Non-Selective Anti-CD33 Full VL
DIQMTQSPSSLSASVGDRVTITCRASQRIGNWLAWYQQKPGKAPKLLIYAASSLQSGVPSRFSGSGSGTDFTLTISSLQPEDFATYYCQQSYSPPLTFGPGTKVDIKR

SEQ ID NO: 1138 - protein, 108 aa, synthetic construct
  REGION 1..108: note = Non-Selective Anti-CD33 Full VL
DIQMTQSPSSLSASVGDRVTITCRASQGISSYLAWYQQKPGKAPKLLIYDASNLDTGVPSRFSGSGSGTDFTLTISSLQPEDFATYYCQQSYSTPLTFGGGTKVEIKR

SEQ ID NO: 1139 - protein, 108 aa, synthetic construct
  REGION 1..108: note = Non-Selective Anti-CD33 Full VL
EIVMTQSPATLSVSPGERATLSCRASQSVGSNLAWYQQKPGQAPRLLIYGASTRATGIPARFSGSGSGTEFTLTISSLQSEDFAVYYCQQSHSLPPTFGQGTRLEIKR

SEQ ID NO: 1140 - protein, 108 aa, synthetic construct
  REGION 1..108: note = Non-Selective Anti-CD33 Full VL
DIQMTQSPSSLSASVGDRVTITCRASQGIRNYLAWYQQKPGKAPKLLIYAASSLQSGVPSRFSGSGSGTDFTLTISSLQPEDFATYYCQQSYSIPLTFGGGTKVEIKR

SEQ ID NO: 1141 - protein, 108 aa, synthetic construct
  REGION 1..108: note = Non-Selective Anti-CD33 Full VL
DIQMTQSPSSLSASVGDRVTITCRASQSISSWLAWYQQKPGKAPKLLIYDASTLQSGVPSRFSGSGSGTDFTLTISSLQPEDFATYYCQQSYSIPLTFGGGTKVEIKR

SEQ ID NO: 1142 - protein, 108 aa, synthetic construct
  REGION 1..108: note = Non-Selective Anti-CD33 Full VL
DIQMTQSPSSLSASVGDRVTITCRASQSISSYLNWYQQKPGKAPKLLIYAASSLHSGVPSRFSGSGSGTDFTLTISSLQPEDFATYYCQQSYSPPITFGQGTRLEIKR

SEQ ID NO: 1143 - protein, 108 aa, synthetic construct; identical to SEQ ID NO: 331
  REGION 1..108: note = Non-Selective Anti-CD33 Full VL

SEQ ID NO: 1144 - protein, 108 aa, synthetic construct
  REGION 1..108: note = Non-Selective Anti-CD33 Full VL
DIQMTQSPSSLSASVGDRVTITCRASQSIGTYLSWYQQKPGKAPKLLIYAASSLQSGVPSRFSGSGSGTDFTLTISSLQPEDFATYYCQQSYSSPITFGQGTKLEIKR

SEQ ID NO: 1145 - protein, 9 aa, synthetic construct
  REGION 1..9: note = Non-Selective Anti-CLL-1 HCDR1
YTFTAYYMH

SEQ ID NO: 1146 - protein, 9 aa, synthetic construct
  REGION 1..9: note = Non-Selective Anti-CLL-1 HCDR1
GTFSTSYMH

SEQ ID NO: 1147 - protein, 9 aa, synthetic construct
  REGION 1..9: note = Non-Selective Anti-CLL-1 HCDR1
YTFSGHYMH

SEQ ID NO: 1148 - protein, 9 aa, synthetic construct
  REGION 1..9: note = Non-Selective Anti-CLL-1 HCDR1
YTFTSYHIH

SEQ ID NO: 1149 - protein, 9 aa, synthetic construct
  REGION 1..9: note = Non-Selective Anti-CLL-1 HCDR1
GTFTTYGIS

SEQ ID NO: 1150 - protein, 9 aa, synthetic construct
  REGION 1..9: note = Non-Selective Anti-CLL-1 HCDR1
YTFTSYDIN

SEQ ID NO: 1151 - protein, 9 aa, synthetic construct
  REGION 1..9: note = Non-Selective Anti-CLL-1 HCDR1
YIFTSQYIH

SEQ ID NO: 1152 - protein, 9 aa, synthetic construct
  REGION 1..9: note = Non-Selective Anti-CLL-1 HCDR1
YTFTDYYIH

SEQ ID NO: 1153 - protein, 9 aa, synthetic construct
  REGION 1..9: note = Non-Selective Anti-CLL-1 HCDR1
GTFSTNAIS

SEQ ID NO: 1154 - protein, 9 aa, synthetic construct
  REGION 1..9: note = Non-Selective Anti-CLL-1 HCDR1
GAFSSYALS

SEQ ID NO: 1155 - protein, 9 aa, synthetic construct
  REGION 1..9: note = Non-Selective Anti-CLL-1 HCDR1
GTFSSYGVT

SEQ ID NO: 1156 - protein, 9 aa, synthetic construct
  REGION 1..9: note = Non-Selective Anti-CLL-1 HCDR1
YTFTSYDIN

SEQ ID NO: 1157 - protein, 9 aa, synthetic construct
  REGION 1..9: note = Non-Selective Anti-CLL-1 HCDR1
YTFTGYFIH

SEQ ID NO: 1158 - protein, 9 aa, synthetic construct
  REGION 1..9: note = Non-Selective Anti-CLL-1 HCDR1
YTFSDYYIH

SEQ ID NO: 1159 - protein, 9 aa, synthetic construct
  REGION 1..9: note = Non-Selective Anti-CLL-1 HCDR1
DSFSSYGIS

SEQ ID NO: 1160 - protein, 9 aa, synthetic construct
  REGION 1..9: note = Non-Selective Anti-CLL-1 HCDR1
YSFTANYIH

SEQ ID NO: 1161 - protein, 9 aa, synthetic construct
  REGION 1..9: note = Non-Selective Anti-CLL-1 HCDR1
GTFTSYDIN

SEQ ID NO: 1162 - protein, 9 aa, synthetic construct
  REGION 1..9: note = Non-Selective Anti-CLL-1 HCDR1
YTFTSYDIN

SEQ ID NO: 1163 - protein, 9 aa, synthetic construct
  REGION 1..9: note = Non-Selective Anti-CLL-1 HCDR1
YTFTNYGIS

SEQ ID NO: 1164 - protein, 9 aa, synthetic construct
  REGION 1..9: note = Non-Selective Anti-CLL-1 HCDR1
YTFTSYYMQ

SEQ ID NO: 1165 - protein, 9 aa, synthetic construct
  REGION 1..9: note = Non-Selective Anti-CLL-1 HCDR1
YTFTAHYIH

SEQ ID NO: 1166 - protein, 9 aa, synthetic construct
  REGION 1..9: note = Non-Selective Anti-CLL-1 HCDR1
YTFTSYDIN

SEQ ID NO: 1167 - protein, 9 aa, synthetic construct
  REGION 1..9: note = Non-Selective Anti-CLL-1 HCDR1
YTFESYDMN

SEQ ID NO: 1168 - protein, 9 aa, synthetic construct
  REGION 1..9: note = Non-Selective Anti-CLL-1 HCDR1
YTFTSYYMH

SEQ ID NO: 1169 - protein, 9 aa, synthetic construct
  REGION 1..9: note = Non-Selective Anti-CLL-1 HCDR1
YTFTNYGIS

SEQ ID NO: 1170 - protein, 9 aa, synthetic construct
  REGION 1..9: note = Non-Selective Anti-CLL-1 HCDR1
YTFTNDYIH

SEQ ID NO: 1171 - protein, 9 aa, synthetic construct
  REGION 1..9: note = Non-Selective Anti-CLL-1 HCDR1
GSFSNHGVS

SEQ ID NO: 1172 - protein, 9 aa, synthetic construct
  REGION 1..9: note = Non-Selective Anti-CLL-1 HCDR1
YTFTDYYIH

SEQ ID NO: 1173 - protein, 9 aa, synthetic construct
  REGION 1..9: note = Non-Selective Anti-CLL-1 HCDR1
YTFSDYYVH

SEQ ID NO: 1174 - protein, 9 aa, synthetic construct
  REGION 1..9: note = Non-Selective Anti-CLL-1 HCDR1
YTFNGYNMH

SEQ ID NO: 1175 - protein, 9 aa, synthetic construct
  REGION 1..9: note = Non-Selective Anti-CLL-1 HCDR1
FIFRDHWMH

SEQ ID NO: 1176 - protein, 9 aa, synthetic construct
  REGION 1..9: note = Non-Selective Anti-CLL-1 HCDR1
YTFTSYDIH

SEQ ID NO: 1177 - protein, 9 aa, synthetic construct
  REGION 1..9: note = Non-Selective Anti-CLL-1 HCDR1
GSFTSYYIH

SEQ ID NO: 1178 - protein, 9 aa, synthetic construct
  REGION 1..9: note = Non-Selective Anti-CLL-1 HCDR1
YTFTSYYMH

SEQ ID NO: 1179 - protein, 9 aa, synthetic construct
  REGION 1..9: note = Non-Selective Anti-CLL-1 HCDR1
FTFSSSDMS

SEQ ID NO: 1180 - protein, 9 aa, synthetic construct
  REGION 1..9: note = Non-Selective Anti-CLL-1 HCDR1
GTFSSYAIS

SEQ ID NO: 1181 - protein, 9 aa, synthetic construct
  REGION 1..9: note = Non-Selective Anti-CLL-1 HCDR1
YTFTSLDIN

SEQ ID NO: 1182 - protein, 9 aa, synthetic construct
  REGION 1..9: note = Non-Selective Anti-CLL-1 HCDR1
YTFTGYYMH

SEQ ID NO: 1183 - protein, 9 aa, synthetic construct
  REGION 1..9: note = Non-Selective Anti-CLL-1 HCDR1
YTFTDYYMH

SEQ ID NO: 1184 - protein, 9 aa, synthetic construct
  REGION 1..9: note = Non-Selective Anti-CLL-1 HCDR1
GTFSSYAIS

SEQ ID NO: 1185 - protein, 9 aa, synthetic construct
  REGION 1..9: note = Non-Selective Anti-CLL-1 HCDR1
GTFGNYGIN

SEQ ID NO: 1186 - protein, 9 aa, synthetic construct
  REGION 1..9: note = Non-Selective Anti-CLL-1 HCDR1
FTFSNSDMY

SEQ ID NO: 1187 - protein, 9 aa, synthetic construct
  REGION 1..9: note = Non-Selective Anti-CLL-1 HCDR1
YTFTKYYMH

SEQ ID NO: 1188 - protein, 9 aa, synthetic construct
  REGION 1..9: note = Non-Selective Anti-CLL-1 HCDR1
FTFSSYDMH

SEQ ID NO: 1189 - protein, 9 aa, synthetic construct
  REGION 1..9: note = Non-Selective Anti-CLL-1 HCDR1
FTFSSYGMH

SEQ ID NO: 1190 - protein, 9 aa, synthetic construct
  REGION 1..9: note = Non-Selective Anti-CLL-1 HCDR1
LTAGSNYMS

SEQ ID NO: 1191 - protein, 9 aa, synthetic construct
  REGION 1..9: note = Non-Selective Anti-CLL-1 HCDR1
FTFSSSWMH

SEQ ID NO: 1192 - protein, 13 aa, synthetic construct
  REGION 1..13: note = Non-Selective Anti-CLL-1 HCDR2
GIIDPSGGSTSYA

SEQ ID NO: 1193 - protein, 13 aa, synthetic construct
  REGION 1..13: note = Non-Selective Anti-CLL-1 HCDR2
GWIHPDDGNTDYA

SEQ ID NO: 1194 - protein, 13 aa, synthetic construct
  REGION 1..13: note = Non-Selective Anti-CLL-1 HCDR2
GWIDPNSGGTNYA

SEQ ID NO: 1195 - protein, 13 aa, synthetic construct
  REGION 1..13: note = Non-Selective Anti-CLL-1 HCDR2
GGIIPSGGSTSYA

SEQ ID NO: 1196 - protein, 13 aa, synthetic construct
  REGION 1..13: note = Non-Selective Anti-CLL-1 HCDR2
GWMNPFSDNTDYA

SEQ ID NO: 1197 - protein, 13 aa, synthetic construct
  REGION 1..13: note = Non-Selective Anti-CLL-1 HCDR2
GWMNPNSGNTGYA

SEQ ID NO: 1198 - protein, 13 aa, synthetic construct
  REGION 1..13: note = Non-Selective Anti-CLL-1 HCDR2
GWINPNSGGTNYA

SEQ ID NO: 1199 - protein, 13 aa, synthetic construct
  REGION 1..13: note = Non-Selective Anti-CLL-1 HCDR2
GWMNPNSGNTGYA

SEQ ID NO: 1200 - protein, 13 aa, synthetic construct
  REGION 1..13: note = Non-Selective Anti-CLL-1 HCDR2
GWMNPNSGNTGYA

SEQ ID NO: 1201 - protein, 13 aa, synthetic construct
  REGION 1..13: note = Non-Selective Anti-CLL-1 HCDR2
GWMNPNSGNTGYA

SEQ ID NO: 1202 - protein, 13 aa, synthetic construct
  REGION 1..13: note = Non-Selective Anti-CLL-1 HCDR2
GWINPNTGGTDYA

SEQ ID NO: 1203 - protein, 13 aa, synthetic construct
  REGION 1..13: note = Non-Selective Anti-CLL-1 HCDR2
GWMNPSSGDSGYA

SEQ ID NO: 1204 - protein, 13 aa, synthetic construct
  REGION 1..13: note = Non-Selective Anti-CLL-1 HCDR2
GWMNPNSGNTGYA

SEQ ID NO: 1205 - protein, 13 aa, synthetic construct
  REGION 1..13: note = Non-Selective Anti-CLL-1 HCDR2
GIINPSGGSTSYA

SEQ ID NO: 1206 - protein, 13 aa, synthetic construct
  REGION 1..13: note = Non-Selective Anti-CLL-1 HCDR2
GWINPKSGATTSA

SEQ ID NO: 1207 - protein, 13 aa, synthetic construct
  REGION 1..13: note = Non-Selective Anti-CLL-1 HCDR2
GIINPSGGSTSYA

SEQ ID NO: 1208 - protein, 13 aa, synthetic construct
  REGION 1..13: note = Non-Selective Anti-CLL-1 HCDR2
GWINPHSGGTNYA

SEQ ID NO: 1209 - protein, 13 aa, synthetic construct
  REGION 1..13: note = Non-Selective Anti-CLL-1 HCDR2
GMINPNSGGTSYA

SEQ ID NO: 1210 - protein, 13 aa, synthetic construct
  REGION 1..13: note = Non-Selective Anti-CLL-1 HCDR2
GWINPNSGGTNFA

SEQ ID NO: 1211 - protein, 13 aa, synthetic construct
  REGION 1..13: note = Non-Selective Anti-CLL-1 HCDR2
GWMNPNSGNTGYA

SEQ ID NO: 1212 - protein, 13 aa, synthetic construct
  REGION 1..13: note = Non-Selective Anti-CLL-1 HCDR2
GIINPNGGRTTYA

SEQ ID NO: 1213 - protein, 13 aa, synthetic construct
  REGION 1..13: note = Non-Selective Anti-CLL-1 HCDR2
GWMNPNSGNTGYA

SEQ ID NO: 1214 - protein, 13 aa, synthetic construct
  REGION 1..13: note = Non-Selective Anti-CLL-1 HCDR2
GWIDPHSGDTNFA

SEQ ID NO: 1215 - protein, 13 aa, synthetic construct
  REGION 1..13: note = Non-Selective Anti-CLL-1 HCDR2
GWINPNSGGTNYA

SEQ ID NO: 1216 - protein, 13 aa, synthetic construct
  REGION 1..13: note = Non-Selective Anti-CLL-1 HCDR2
GWINPNSGGTNYA

SEQ ID NO: 1217 - protein, 13 aa, synthetic construct
  REGION 1..13: note = Non-Selective Anti-CLL-1 HCDR2
GWMSPNSGKTGFA

SEQ ID NO: 1218 - protein, 13 aa, synthetic construct
  REGION 1..13: note = Non-Selective Anti-CLL-1 HCDR2
GWMNPNSGDTGYA

SEQ ID NO: 1219 - protein, 13 aa, synthetic construct
  REGION 1..13: note = Non-Selective Anti-CLL-1 HCDR2
GMVDPNTGNINYA

SEQ ID NO: 1220 - protein, 13 aa, synthetic construct
  REGION 1..13: note = Non-Selective Anti-CLL-1 HCDR2
GWMNPNSGNTGYA

SEQ ID NO: 1221 - protein, 13 aa, synthetic construct
  REGION 1..13: note = Non-Selective Anti-CLL-1 HCDR2
GWINPNSGDTNYA

SEQ ID NO: 1222 - protein, 13 aa, synthetic construct
  REGION 1..13: note = Non-Selective Anti-CLL-1 HCDR2
SSIDFSTGYIYYA

SEQ ID NO: 1223 - protein, 13 aa, synthetic construct
  REGION 1..13: note = Non-Selective Anti-CLL-1 HCDR2
GWINPNSGNTGYA

SEQ ID NO: 1224 - protein, 13 aa, synthetic construct
  REGION 1..13: note = Non-Selective Anti-CLL-1 HCDR2
GWMNPNSGNTGYA

SEQ ID NO: 1225 - protein, 13 aa, synthetic construct
  REGION 1..13: note = Non-Selective Anti-CLL-1 HCDR2
GWMNPNSGNTGYA

SEQ ID NO: 1226 - protein, 13 aa, synthetic construct
  REGION 1..13: note = Non-Selective Anti-CLL-1 HCDR2
SSITGSGDGTYYA

SEQ ID NO: 1227 - protein, 13 aa, synthetic construct
  REGION 1..13: note = Non-Selective Anti-CLL-1 HCDR2
GTINPSGGSTNYA

SEQ ID NO: 1228 - protein, 13 aa, synthetic construct
  REGION 1..13: note = Non-Selective Anti-CLL-1 HCDR2
GSMNPRSGSTAYA

SEQ ID NO: 1229 - protein, 13 aa, synthetic construct
  REGION 1..13: note = Non-Selective Anti-CLL-1 HCDR2
GVINPSGGSTSYA

SEQ ID NO: 1230 - protein, 13 aa, synthetic construct
  REGION 1..13: note = Non-Selective Anti-CLL-1 HCDR2
GIINTGAGTTNYA

SEQ ID NO: 1231 - protein, 13 aa, synthetic construct
  REGION 1..13: note = Non-Selective Anti-CLL-1 HCDR2
GGIIPKFGPPNYA

SEQ ID NO: 1232 - protein, 13 aa, synthetic construct
  REGION 1..13: note = Non-Selective Anti-CLL-1 HCDR2
GVINPSSGGTNLA

SEQ ID NO: 1233 - protein, 13 aa, synthetic construct
  REGION 1..13: note = Non-Selective Anti-CLL-1 HCDR2
SAISGSDGTTYYA

SEQ ID NO: 1234 - protein, 13 aa, synthetic construct
  REGION 1..13: note = Non-Selective Anti-CLL-1 HCDR2
GWINPNSGNTGYA

SEQ ID NO: 1235 - protein, 13 aa, synthetic construct
  REGION 1..13: note = Non-Selective Anti-CLL-1 HCDR2
SSISSSSSYIYYA

SEQ ID NO: 1236 - protein, 13 aa, synthetic construct
  REGION 1..13: note = Non-Selective Anti-CLL-1 HCDR2
SYTSSSSSTIYYA

SEQ ID NO: 1237 - protein, 13 aa, synthetic construct
  REGION 1..13: note = Non-Selective Anti-CLL-1 HCDR2
SAISDDGHWTDYA

SEQ ID NO: 1238 - protein, 13 aa, synthetic construct
  REGION 1..13: note = Non-Selective Anti-CLL-1 HCDR2
STINTNGDAAYYA

SEQ ID NO: 1239 - protein, 13 aa, synthetic construct
  REGION 1..13: note = Non-Selective Anti-CLL-1 HCDR3
CARGDYGDYHTLW

SEQ ID NO: 1240 - protein, 14 aa, synthetic construct
  REGION 1..14: note = Non-Selective Anti-CLL-1 HCDR3
CARDLGDYDTFDIW

SEQ ID NO: 1241 - protein, 17 aa, synthetic construct
  REGION 1..17: note = Non-Selective Anti-CLL-1 HCDR3
CARDYPFYGDNDAFDIW

SEQ ID NO: 1242 - protein, 13 aa, synthetic construct
  REGION 1..13: note = Non-Selective Anti-CLL-1 HCDR3
CARGTNDDHYDYW

SEQ ID NO: 1243 - protein, 13 aa, synthetic construct [sequence omitted]

SEQ ID NO: 1244 - protein, 13 aa, synthetic construct
  REGION 1..13: note = Non-Selective Anti-CLL-1 HCDR3
CARELEGEWFDPW

SEQ ID NO: 1245 - protein, 17 aa, synthetic construct
  REGION 1..17: note = Non-Selective Anti-CLL-1 HCDR3
CARDPWGAYGGDAFDIW

SEQ ID NO: 1246 - protein, 13 aa, synthetic construct
  REGION 1..13: note = Non-Selective Anti-CLL-1 HCDR3
CARVDTADYMDVW

SEQ ID NO: 1247 - protein, 13 aa, synthetic construct
  REGION 1..13: note = Non-Selective Anti-CLL-1 HCDR3
CAKEDYGGNFDYW

SEQ ID NO: 1248 - protein, 15 aa, synthetic construct
  REGION 1..15: note = Non-Selective Anti-CLL-1 HCDR3
CAADWMIGGDAFDIW

SEQ ID NO: 1249 - protein, 16 aa, synthetic construct
  REGION 1..16: note = Non-Selective Anti-CLL-1 HCDR3
CAGEVGVGGYDAFDIW

SEQ ID NO: 1250 - protein, 13 aa, synthetic construct
  REGION 1..13: note = Non-Selective Anti-CLL-1 HCDR3
CARPERSDAFDIW

SEQ ID NO: 1251 - protein, 13 aa, synthetic construct
  REGION 1..13: note = Non-Selective Anti-CLL-1 HCDR3
CARGDYADWFDPW

SEQ ID NO: 1252 - protein, 13 aa, synthetic construct
  REGION 1..13: note = Non-Selective Anti-CLL-1 HCDR3
CARGMTDDAFDIW

SEQ ID NO: 1253 - protein, 13 aa, synthetic construct
  REGION 1..13: note = Non-Selective Anti-CLL-1 HCDR3
CARSTAFDAFDIW

SEQ ID NO: 1254 - protein, 13 aa, synthetic construct
  REGION 1..13: note = Non-Selective Anti-CLL-1 HCDR3
CARGNYGDYVEDW

SEQ ID NO: 1255 - protein, 13 aa, synthetic construct
  REGION 1..13: note = Non-Selective Anti-CLL-1 HCDR3
CARLVGGDAFDIW

SEQ ID NO: 1256 - protein, 13 aa, synthetic construct
  REGION 1..13: note = Non-Selective Anti-CLL-1 HCDR3
CARELLGESFDYW

SEQ ID NO: 1257 - protein, 13 aa, synthetic construct
  REGION 1..13: note = Non-Selective Anti-CLL-1 HCDR3
CARGTNGDELDYW

SEQ ID NO: 1258 - protein, 13 aa, synthetic construct
  REGION 1..13: note = Non-Selective Anti-CLL-1 HCDR3
CARALYGDYLDIW

SEQ ID NO: 1259 - protein, 22 aa, synthetic construct
  REGION 1..22: note = Non-Selective Anti-CLL-1 HCDR3
CARDSDFWSGYYSDYYYGMDVW

SEQ ID NO: 1260 - protein, 13 aa, synthetic construct
  REGION 1..13: note = Non-Selective Anti-CLL-1 HCDR3
CARLSSGYYPDYW

SEQ ID NO: 1261 - protein, 13 aa, synthetic construct
  REGION 1..13: note = Non-Selective Anti-CLL-1 HCDR3
CARADYGGNADYW

SEQ ID NO: 1262 - protein, 13 aa, synthetic construct
  REGION 1..13: note = Non-Selective Anti-CLL-1 HCDR3
CARGTTGDDFDYW

SEQ ID NO: 1263 - protein, 13 aa, synthetic construct
  REGION 1..13: note = Non-Selective Anti-CLL-1 HCDR3
CARVRSDDFFDYW

SEQ ID NO: 1264 - protein, 14 aa, synthetic construct
  REGION 1..14: note = Non-Selective Anti-CLL-1 HCDR3
CAKDNSSGWYFDLW

SEQ ID NO: 1265 - protein, 13 aa, synthetic construct
  REGION 1..13: note = Non-Selective Anti-CLL-1 HCDR3
CARPRKDDAFAIW

SEQ ID NO: 1266 - protein, 13 aa, synthetic construct
  REGION 1..13: note = Non-Selective Anti-CLL-1 HCDR3
CTSGSTNDAFDIW

SEQ ID NO: 1267 - protein, 13 aa, synthetic construct
  REGION 1..13: note = Non-Selective Anti-CLL-1 HCDR3
CARGLTGDQFDYW

SEQ ID NO: 1268 - protein, 13 aa, synthetic construct
  REGION 1..13: note = Non-Selective Anti-CLL-1 HCDR3
CASLDYGDYAVYW

SEQ ID NO: 1269 - protein, 14 aa, synthetic construct
  REGION 1..14: note = Non-Selective Anti-CLL-1 HCDR3
CARDPWGDGDFDYW

SEQ ID NO: 1270 - protein, 16 aa, synthetic construct
  REGION 1..16: note = Non-Selective Anti-CLL-1 HCDR3
CAGGPDVDAAMVLDYW

SEQ ID NO: 1271 - protein, 13 aa, synthetic construct
  REGION 1..13: note = Non-Selective Anti-CLL-1 HCDR3
CARGATDDAFDIW

SEQ ID NO: 1272 - protein, 13 aa, synthetic construct
  REGION 1..13: note = Non-Selective Anti-CLL-1 HCDR3
CARSTYSDSFDYW

SEQ ID NO: 1273 - protein, 11 aa, synthetic construct
  REGION 1..11: note = Non-Selective Anti-CLL-1 HCDR3
CIRDWEGIYQW

SEQ ID NO: 1274 - protein, 14 aa, synthetic construct
  REGION 1..14: note = Non-Selective Anti-CLL-1 HCDR3
CAIGGYDSPYMDVW

SEQ ID NO: 1275 - protein, 13 aa, synthetic construct
  REGION 1..13: note = Non-Selective Anti-CLL-1 HCDR3
CAKSDYGDYLDYW

SEQ ID NO: 1276 - protein, 13 aa, synthetic construct
  REGION 1..13: note = Non-Selective Anti-CLL-1 HCDR3
CARGRTDDAFDIW

SEQ ID NO: 1277 - protein, 13 aa, synthetic construct
  REGION 1..13: note = Non-Selective Anti-CLL-1 HCDR3
CARGLTSDHFDYW

SEQ ID NO: 1278 - protein, 13 aa, synthetic construct
  REGION 1..13: note = Non-Selective Anti-CLL-1 HCDR3
CARNSYGDDFDYW

SEQ ID NO: 1279 - protein, 15 aa, synthetic construct
  REGION 1..15: note = Non-Selective Anti-CLL-1 HCDR3
CARSLGWPSPYMDVW

SEQ ID NO: 1280 - protein, 14 aa, synthetic construct
  REGION 1..14: note = Non-Selective Anti-CLL-1 HCDR3
CARDDYGDQGFDLW

SEQ ID NO: 1281 - protein, 20 aa, synthetic construct
  REGION 1..20: note = Non-Selective Anti-CLL-1 HCDR3
CARDIAVAGSTYYYYGMDVW

SEQ ID NO: 1282 - protein, 13 aa, synthetic construct
  REGION 1..13: note = Non-Selective Anti-CLL-1 HCDR3
CARDIDDVAGDYW

SEQ ID NO: 1283 - protein, 19 aa, synthetic construct
  REGION 1..19: note = Non-Selective Anti-CLL-1 HCDR3
CARGNVGDNWNDDEAFLGW

SEQ ID NO: 1284 - protein, 13 aa, synthetic construct
  REGION 1..13: note = Non-Selective Anti-CLL-1 HCDR3
CVKDDGEGSGIDW

SEQ ID NO: 1285 - protein, 21 aa, synthetic construct
  REGION 1..21: note = Non-Selective Anti-CLL-1 HCDR3
CARDTVLDDYGDYDDYGMDVW

SEQ ID NO: 1286 - protein, 11 aa, synthetic construct
  REGION 1..11: note = Non-Selective Anti-CLL-1 LCDR1
RASQGISSYLA

SEQ ID NO: 1287 - protein, 11 aa, synthetic construct
  REGION 1..11: note = Non-Selective Anti-CLL-1 LCDR1
RVSQGISSYLN

SEQ ID NO: 1288 - protein, 11 aa, synthetic construct
  REGION 1..11: note = Non-Selective Anti-CLL-1 LCDR1
RVSQGISSYLN

SEQ ID NO: 1289 - protein, 11 aa, synthetic construct
  REGION 1..11: note = Non-Selective Anti-CLL-1 LCDR1
RASQGISNYLA

SEQ ID NO: 1290 - protein, 11 aa, synthetic construct
  REGION 1..11: note = Non-Selective Anti-CLL-1 LCDR1
RASQSISTWVA

SEQ ID NO: 1291 - protein, 11 aa, synthetic construct
  REGION 1..11: note = Non-Selective Anti-CLL-1 LCDR1
RASQSISSYLN

SEQ ID NO: 1292 - protein, 11 aa, synthetic construct
  REGION 1..11: note = Non-Selective Anti-CLL-1 LCDR1
RASQGISNNLN

SEQ ID NO: 1293 - protein, 11 aa, synthetic construct
  REGION 1..11: note = Non-Selective Anti-CLL-1 LCDR1
RASQGISSWLA

SEQ ID NO: 1294 - protein, 11 aa, synthetic construct
  REGION 1..11: note = Non-Selective Anti-CLL-1 LCDR1
RASQSIGPWLA

SEQ ID NO: 1295 - protein, 11 aa, synthetic construct
  REGION 1..11: note = Non-Selective Anti-CLL-1 LCDR1
RASQSISSWLA

SEQ ID NO: 1296 - protein, 11 aa, synthetic construct
  REGION 1..11: note = Non-Selective Anti-CLL-1 LCDR1
RASQGISNWLA

SEQ ID NO: 1297 - protein, 11 aa, synthetic construct
  REGION 1..11: note = Non-Selective Anti-CLL-1 LCDR1
RASQSIGPWLA

SEQ ID NO: 1298 - protein, 11 aa, synthetic construct
  REGION 1..11: note = Non-Selective Anti-CLL-1 LCDR1
RASQSISTWLA

SEQ ID NO: 1299 - protein, 11 aa, synthetic construct
  REGION 1..11: note = Non-Selective Anti-CLL-1 LCDR1
RASQGISSWLA

SEQ ID NO: 1300 - protein, 11 aa, synthetic construct
  REGION 1..11: note = Non-Selective Anti-CLL-1 LCDR1
RASQSISSWLA

SEQ ID NO: 1301 - protein, 11 aa, synthetic construct
  REGION 1..11: note = Non-Selective Anti-CLL-1 LCDR1
RASQSISSWLA

SEQ ID NO: 1302 - protein, 11 aa, synthetic construct
  REGION 1..11: note = Non-Selective Anti-CLL-1 LCDR1
RASQSISSWLA

SEQ ID NO: 1303 - protein, 11 aa, synthetic construct
  REGION 1..11: note = Non-Selective Anti-CLL-1 LCDR1
RASQGISSYLA

SEQ ID NO: 1304 - protein, 11 aa, synthetic construct
  REGION 1..11: note = Non-Selective Anti-CLL-1 LCDR1
RASQSISSYLA

SEQ ID NO: 1305 - protein, 11 aa, synthetic construct
  REGION 1..11: note = Non-Selective Anti-CLL-1 LCDR1
RASQPIATWLA

SEQ ID NO: 1306 - protein, 11 aa, synthetic construct
  REGION 1..11: note = Non-Selective Anti-CLL-1 LCDR1
QASQDISNFLN

SEQ ID NO: 1307 - protein, 11 aa, synthetic construct
  REGION 1..11: note = Non-Selective Anti-CLL-1 LCDR1
RASQFIANWLA

SEQ ID NO: 1308 - protein, 11 aa, synthetic construct
  REGION 1..11: note = Non-Selective Anti-CLL-1 LCDR1
RASQGISNWLA

SEQ ID NO: 1309 - protein, 11 aa, synthetic construct
  REGION 1..11: note = Non-Selective Anti-CLL-1 LCDR1
RASQDISTWLA

SEQ ID NO: 1310 - protein, 11 aa, synthetic construct
  REGION 1..11: note = Non-Selective Anti-CLL-1 LCDR1
RASQSVNHWLA

SEQ ID NO: 1311 - protein, 11 aa, synthetic construct
  REGION 1..11: note = Non-Selective Anti-CLL-1 LCDR1
RVSQGISSYLA

SEQ ID NO: 1312 - protein, 11 aa, synthetic construct
  REGION 1..11: note = Non-Selective Anti-CLL-1 LCDR1
RASQSISSWLA

SEQ ID NO: 1313 - protein, 11 aa, synthetic construct
  REGION 1..11: note = Non-Selective Anti-CLL-1 LCDR1
RASQSIGPWLA

SEQ ID NO: 1314 - protein, 11 aa, synthetic construct
  REGION 1..11: note = Non-Selective Anti-CLL-1 LCDR1
RASQSISSYLN

SEQ ID NO: 1315 - protein, 11 aa, synthetic construct
  REGION 1..11: note = Non-Selective Anti-CLL-1 LCDR1
RASQSISTWLA

SEQ ID NO: 1316 - protein, 11 aa, synthetic construct
  REGION 1..11: note = Non-Selective Anti-CLL-1 LCDR1
RASQSISSWLA

SEQ ID NO: 1317 - protein, 11 aa, synthetic construct
  REGION 1..11: note = Non-Selective Anti-CLL-1 LCDR1
QASQDISNYLN

SEQ ID NO: 1318 - protein, 11 aa, synthetic construct
  REGION 1..11: note = Non-Selective Anti-CLL-1 LCDR1
RASQNIDTWLA

SEQ ID NO: 1319 - protein, 11 aa, synthetic construct
  REGION 1..11: note = Non-Selective Anti-CLL-1 LCDR1
RASQSISNWLA

SEQ ID NO: 1320 - protein, 11 aa, synthetic construct
  REGION 1..11: note = Non-Selective Anti-CLL-1 LCDR1
RVSQGISSYLN

SEQ ID NO: 1321 - protein, 11 aa, synthetic construct
  REGION 1..11: note = Non-Selective Anti-CLL-1 LCDR1
QASQDISNYLN

SEQ ID NO: 1322 - protein, 11 aa, synthetic construct
  REGION 1..11: note = Non-Selective Anti-CLL-1 LCDR1
RASQSISPWLA

SEQ ID NO: 1323 - protein, 11 aa, synthetic construct
  REGION 1..11: note = Non-Selective Anti-CLL-1 LCDR1
RASQTISSWLA

SEQ ID NO: 1324 - protein, 11 aa, synthetic construct
  REGION 1..11: note = Non-Selective Anti-CLL-1 LCDR1
RASQNIGPWLA

SEQ ID NO: 1325 - protein, 11 aa, synthetic construct
  REGION 1..11: note = Non-Selective Anti-CLL-1 LCDR1
RASQSISSWLA

SEQ ID NO: 1326 - protein, 11 aa, synthetic construct
  REGION 1..11: note = Non-Selective Anti-CLL-1 LCDR1
RASQSISRYLN

SEQ ID NO: 1327 - protein, 11 aa, synthetic construct
  REGION 1..11: note = Non-Selective Anti-CLL-1 LCDR1
RASQDIRNDLG

SEQ ID NO: 1328 - protein, 11 aa, synthetic construct
  REGION 1..11: note = Non-Selective Anti-CLL-1 LCDR1
QASQDISNYLN

SEQ ID NO: 1329 - protein, 11 aa, synthetic construct
  REGION 1..11: note = Non-Selective Anti-CLL-1 LCDR1
QASQDISNYLN

SEQ ID NO: 1330 - protein, 11 aa, synthetic construct
  REGION 1..11: note = Non-Selective Anti-CLL-1 LCDR1
QASQDISNYLN

SEQ ID NO: 1331 - protein, 11 aa, synthetic construct
  REGION 1..11: note = Non-Selective Anti-CLL-1 LCDR1
RASQGISDYLA

SEQ ID NO: 1332 - protein, 12 aa, synthetic construct
  REGION 1..12: note = Non-Selective Anti-CLL-1 LCDR1
RASQSVSSSYLA

SEQ ID NO: 1333 - protein, 7 aa, synthetic construct
  REGION 1..7: note = Non-Selective Anti-CLL-1 LCDR2
DASSLQS

SEQ ID NO: 1334 - protein, 7 aa, synthetic construct
  REGION 1..7: note = Non-Selective Anti-CLL-1 LCDR2
DASNLQA

SEQ ID NO: 1335 - protein, 7 aa, synthetic construct
  REGION 1..7: note = Non-Selective Anti-CLL-1 LCDR2
EASSLES

SEQ ID NO: 1336 - protein, 7 aa, synthetic construct
  REGION 1..7: note = Non-Selective Anti-CLL-1 LCDR2
DASNLET

SEQ ID NO: 1337 - protein, 7 aa, synthetic construct
  REGION 1..7: note = Non-Selective Anti-CLL-1 LCDR2
AASSLQS

SEQ ID NO: 1338 - protein, 7 aa, synthetic construct
  REGION 1..7: note = Non-Selective Anti-CLL-1 LCDR2
SASNLQS

SEQ ID NO: 1339 - protein, 7 aa, synthetic construct
  REGION 1..7: note = Non-Selective Anti-CLL-1 LCDR2
DASHLDT

SEQ ID NO: 1340 - protein, 7 aa, synthetic construct
  REGION 1..7: note = Non-Selective Anti-CLL-1 LCDR2
DASNLQT

SEQ ID NO: 1341 - protein, 7 aa, synthetic construct
  REGION 1..7: note = Non-Selective Anti-CLL-1 LCDR2
DASNLQA

SEQ ID NO: 1342 - protein, 7 aa, synthetic construct
  REGION 1..7: note = Non-Selective Anti-CLL-1 LCDR2
DASRLQS

SEQ ID NO: 1343 - protein, 7 aa, synthetic construct
  REGION 1..7: note = Non-Selective Anti-CLL-1 LCDR2
AASSLQS

SEQ ID NO: 1344 - protein, 7 aa, synthetic construct
  REGION 1..7: note = Non-Selective Anti-CLL-1 LCDR2
DASNLEA

SEQ ID NO: 1345 - protein, 7 aa, synthetic construct
  REGION 1..7: note = Non-Selective Anti-CLL-1 LCDR2
DAFTLET

SEQ ID NO: 1346 - protein, 7 aa, synthetic construct
  REGION 1..7: note = Non-Selective Anti-CLL-1 LCDR2
DASNLET

SEQ ID NO: 1347 - protein, 7 aa, synthetic construct
  REGION 1..7: note = Non-Selective Anti-CLL-1 LCDR2
DASNLET

SEQ ID NO: 1348 - protein, 7 aa, synthetic construct
  REGION 1..7: note = Non-Selective Anti-CLL-1 LCDR2
DASNLET

SEQ ID NO: 1349 - protein, 7 aa, synthetic construct
  REGION 1..7: note = Non-Selective Anti-CLL-1 LCDR2
AASSLQG

SEQ ID NO: 1350 - protein, 7 aa, synthetic construct
  REGION 1..7: note = Non-Selective Anti-CLL-1 LCDR2
GASILQS

SEQ ID NO: 1351 - protein, 7 aa, synthetic construct
  REGION 1..7: note = Non-Selective Anti-CLL-1 LCDR2
AASTLQS

SEQ ID NO: 1352 - protein, 7 aa, synthetic construct
  REGION 1..7: note = Non-Selective Anti-CLL-1 LCDR2
DTSSLQS

SEQ ID NO: 1353 - protein, 7 aa, synthetic construct
  REGION 1..7: note = Non-Selective Anti-CLL-1 LCDR2
ATSTLQS

SEQ ID NO: 1354 - protein, 7 aa, synthetic construct
  REGION 1..7: note = Non-Selective Anti-CLL-1 LCDR2
DASSLES

SEQ ID NO: 1355 - protein, 7 aa, synthetic construct
  REGION 1..7: note = Non-Selective Anti-CLL-1 LCDR2
DASNLET

SEQ ID NO: 1356 - protein, 7 aa, synthetic construct
  REGION 1..7: note = Non-Selective Anti-CLL-1 LCDR2
AASSLQS

SEQ ID NO: 1357 - protein, 7 aa, synthetic construct
  REGION 1..7: note = Non-Selective Anti-CLL-1 LCDR2
AASTLQS

SEQ ID NO: 1358 - protein, 7 aa, synthetic construct
  REGION 1..7: note = Non-Selective Anti-CLL-1 LCDR2
DASNLET

SEQ ID NO: 1359 - protein, 7 aa, synthetic construct
  REGION 1..7: note = Non-Selective Anti-CLL-1 LCDR2
EASTLQS

SEQ ID NO: 1360 - protein, 7 aa, synthetic construct
  REGION 1..7: note = Non-Selective Anti-CLL-1 LCDR2
EASNLAS

SEQ ID NO: 1361 - protein, 7 aa, synthetic construct
  REGION 1..7: note = Non-Selective Anti-CLL-1 LCDR2
AASSLQS

SEQ ID NO: 1362 - protein, 7 aa, synthetic construct
  REGION 1..7: note = Non-Selective Anti-CLL-1 LCDR2
DASSLRS

SEQ ID NO: 1363 - protein, 7 aa, synthetic construct
  REGION 1..7: note = Non-Selective Anti-CLL-1 LCDR2
AASSLQS

SEQ ID NO: 1364 - protein, 7 aa, synthetic construct
  REGION 1..7: note = Non-Selective Anti-CLL-1 LCDR2
DASNLET

SEQ ID NO: 1365 - protein, 7 aa, synthetic construct
  REGION 1..7: note = Non-Selective Anti-CLL-1 LCDR2
DGSNLEA

SEQ ID NO: 1366 - protein, 7 aa, synthetic construct
  REGION 1..7: note = Non-Selective Anti-CLL-1 LCDR2
DASNLET

SEQ ID NO: 1367 - protein, 7 aa, synthetic construct
  REGION 1..7: note = Non-Selective Anti-CLL-1 LCDR2
DASNLET

SEQ ID NO: 1368 - protein, 7 aa, synthetic construct
  REGION 1..7: note = Non-Selective Anti-CLL-1 LCDR2
DASNLET

SEQ ID NO: 1369 - protein, 7 aa, synthetic construct
  REGION 1..7: note = Non-Selective Anti-CLL-1 LCDR2
DASNLQS

SEQ ID NO: 1370 - protein, 7 aa, synthetic construct
  REGION 1..7: note = Non-Selective Anti-CLL-1 LCDR2
AASTLQS

SEQ ID NO: 1371 - protein, 7 aa, synthetic construct
  REGION 1..7: note = Non-Selective Anti-CLL-1 LCDR2
EAFTLQS

SEQ ID NO: 1372 - protein, 7 aa, synthetic construct
  REGION 1..7: note = Non-Selective Anti-CLL-1 LCDR2
AASSLQR

SEQ ID NO: 1373 - protein, 7 aa, synthetic construct
  REGION 1..7: note = Non-Selective Anti-CLL-1 LCDR2
DASNLET

SEQ ID NO: 1374 - protein, 7 aa, synthetic construct
  REGION 1..7: note = Non-Selective Anti-CLL-1 LCDR2
DASNLQT

SEQ ID NO: 1375 - protein, 7 aa, synthetic construct
  REGION 1..7: note = Non-Selective Anti-CLL-1 LCDR2
DATNLET

SEQ ID NO: 1376 - protein, 7 aa, synthetic construct
  REGION 1..7: note = Non-Selective Anti-CLL-1 LCDR2
GASSLQS

SEQ ID NO: 1377 - protein, 7 aa, synthetic construct
  REGION 1..7: note = Non-Selective Anti-CLL-1 LCDR2
DASNLET

SEQ ID NO: 1378 - protein, 7 aa, synthetic construct
  REGION 1..7: note = Non-Selective Anti-CLL-1 LCDR2
GASSLQS

SEQ ID NO: 1379 - protein, 7 aa, synthetic construct
  REGION 1..7: note = Non-Selective Anti-CLL-1 LCDR2
GASTRAA

SEQ ID NO: 1380 - protein, 11 aa, synthetic construct [sequence omitted]

SEQ ID NO: 1381 - protein, 11 aa, synthetic construct
  REGION 1..11: note = Non-Selective Anti-CLL-1 LCDR3
CQQSYSTPPTF

SEQ ID NO: 1382 - protein, 11 aa, synthetic construct [sequence omitted]

SEQ ID NO: 1383 - protein, 11 aa, synthetic construct [sequence omitted]

SEQ ID NO: 1384 - protein, 11 aa, synthetic construct [sequence omitted]

SEQ ID NO: 1385 - protein, 11 aa, synthetic construct [sequence omitted]

SEQ ID NO: 1386 - protein, 11 aa, synthetic construct
  REGION 1..11: note = Non-Selective Anti-CLL-1 LCDR3
CQQNYSPPPTF

SEQ ID NO: 1387 - protein, 11 aa, synthetic construct [sequence omitted]

SEQ ID NO: 1388 - protein, 11 aa, synthetic construct [sequence omitted]

SEQ ID NO: 1389 - protein, 11 aa, synthetic construct [sequence omitted]

SEQ ID NO: 1390 - protein, 11 aa, synthetic construct [sequence omitted]

SEQ ID NO: 1391 - protein, 11 aa, synthetic construct [sequence omitted]

SEQ ID NO: 1392 - protein, 11 aa, synthetic construct [sequence omitted]

SEQ ID NO: 1393 - protein, 11 aa, synthetic construct
  REGION 1..11: note = Non-Selective Anti-CLL-1 LCDR3
CQQTYAIPLTF

SEQ ID NO: 1394 - protein, 11 aa, synthetic construct [sequence omitted]

SEQ ID NO: 1395 - protein, 11 aa, synthetic construct [sequence omitted]

SEQ ID NO: 1396 - protein, 11 aa, synthetic construct [sequence omitted]

SEQ ID NO: 1397 - protein, 11 aa, synthetic construct [sequence omitted]

SEQ ID NO: 1398 - protein, 11 aa, synthetic construct [sequence omitted]

SEQ ID NO: 1399 - protein, 11 aa, synthetic construct
  REGION 1..11: note = Non-Selective Anti-CLL-1 LCDR3
CQQSYSLPLGF

SEQ ID NO: 1400 - protein, 11 aa, synthetic construct
  REGION 1..11: note = Non-Selective Anti-CLL-1 LCDR3
CQQSYTTEWTF

SEQ ID NO: 1401 - protein, 11 aa, synthetic construct [sequence omitted]

SEQ ID NO: 1402 - protein, 11 aa, synthetic construct [sequence omitted]

SEQ ID NO: 1403 - protein, 11 aa, synthetic construct [sequence omitted]

SEQ ID NO: 1404 - protein, 11 aa, synthetic construct [sequence omitted]

SEQ ID NO: 1405 - protein, 11 aa, synthetic construct [sequence omitted]

SEQ ID NO: 1406 - protein, 11 aa, synthetic construct [sequence omitted]

SEQ ID NO: 1407 - protein, 11 aa, synthetic construct [sequence omitted]

SEQ ID NO: 1408 - protein, 11 aa, synthetic construct [sequence omitted]

SEQ ID NO: 1409 - protein, 11 aa, synthetic construct [sequence omitted]

SEQ ID NO: 1410 - protein, 11 aa, synthetic construct [sequence omitted]

SEQ ID NO: 1411 - protein, 11 aa, synthetic construct
  REGION 1..11: note = Non-Selective Anti-CLL-1 LCDR3
CQQADGFPPTF

SEQ ID NO: 1412 - protein, 11 aa, synthetic construct [sequence omitted]

SEQ ID NO: 1413 - protein, 11 aa, synthetic construct [sequence omitted]

SEQ ID NO: 1414 - protein, 11 aa, synthetic construct [sequence omitted]

SEQ ID NO: 1415 - protein, 11 aa, synthetic construct
  REGION 1..11: note = Non-Selective Anti-CLL-1 LCDR3
CQQGYSPPWTF

SEQ ID NO: 1416 - protein, 11 aa, synthetic construct [sequence omitted]

SEQ ID NO: 1417 - protein, 11 aa, synthetic construct [sequence omitted]

SEQ ID NO: 1418 - protein, 11 aa, synthetic construct [sequence omitted]

SEQ ID NO: 1419 - protein, 11 aa, synthetic construct [sequence omitted]

SEQ ID NO: 1420 - protein, 11 aa, synthetic construct [sequence omitted]

SEQ ID NO: 1421 - protein, 11 aa, synthetic construct [sequence omitted]

SEQ ID NO: 1422 - protein, 11 aa, synthetic construct
  REGION 1..11: note = Non-Selective Anti-CLL-1 LCDR3
CQQSYSTPPTF

SEQ ID NO: 1423 - protein, 11 aa, synthetic construct [sequence omitted]

SEQ ID NO: 1424 - protein, 11 aa, synthetic construct [sequence omitted]

SEQ ID NO: 1425 - protein, 11 aa, synthetic construct [sequence omitted]

SEQ ID NO: 1426 - protein, 11 aa, synthetic construct [sequence omitted]

SEQ ID NO: 1427 - protein, 118 aa, synthetic construct
  REGION 1..118: note = Non-Selective Anti-CLL-1 Full VH
QVQLVQSGAEVKKPGASVKVSCKASGYTFTAYYMHWVRQAPGQGLEWMGIIDPSGGSTSYAQQFQGRVTMTRDTSTSTVYMELSSLRSEDTAVYYCARGDYGDYHTLWGQGTLVTVSS

SEQ ID NO: 1428 - protein, 119 aa, synthetic construct
  REGION 1..119: note = Non-Selective Anti-CLL-1 Full VH
QVQLVQSGAEVKKPGASVKVSCKASGGTFSTSYMHWVRQAPGQGLEWMGWIHPDDGNTDYAPKFQGRVTMTRDTSTSTVYMELSSLRSEDTAVYYCARDLGDYDTFDIWGQGTMVTVSS

SEQ ID NO: 1429 - protein, 122 aa, synthetic construct
  REGION 1..122: note = Non-Selective Anti-CLL-1 Full VH
QVQLVQSGAEVKKPGASVKVSCKASGYTFSGHYMHWVRQAPGQGLEWMGWIDPNSGGTNYAQKFQGRVTMTRDTSTSTVYMELSSLRSEDTAVYYCARDYPFYGDNDAFDIWGQGTTVTVSS

SEQ ID NO: 1430 - protein, 118 aa, synthetic construct
  REGION 1..118: note = Non-Selective Anti-CLL-1 Full VH
QVQLVQSGAEVKKPGASVKVSCKASGYTFTSYHIHWVRQAPGQGLEWVGGIIPSGGSTSYAQKFQGRVTMTRDTSTSTVYMELSSLRSEDTAVYYCARGTNDDHYDYWGQGTLVTVSS

SEQ ID NO: 1431 - protein, 118 aa, synthetic construct
  REGION 1..118: note = Non-Selective Anti-CLL-1 Full VH
QVQLVQSGAEVKKPGASVKVSCKASGGTFTTYGISWVRQAPGQGLEWMGWMNPFSDNTDYAQNFQGRVTMTRDTSTSTVYMELSSLRSEDTAVYYCARGTGDDAFDIWGQGTMVTVSS

SEQ ID NO: 1432 - protein, 118 aa, synthetic construct
  REGION 1..118: note = Non-Selective Anti-CLL-1 Full VH
QVQLVQSGAEVKKPGASVKVSCKASGYTFTSYDINWVRQAPGQGLEWMGWMNPNSGNTGYAQKFQGRVTMTRDTSTSTVYMELSSLRSEDTAVYYCARELEGEWFDPWGQGTLVTVSS

SEQ ID NO: 1433 - protein, 122 aa, synthetic construct
  REGION 1..122: note = Non-Selective Anti-CLL-1 Full VH
QVQLVQSGAEVKKPGASVKVSCKASGYIFTSQYIHWVRQAPGQGLEWMGWINPNSGGTNYAQKFQGRVTMTRDTSTSTVYMELSSLRSEDTAVYYCARDPWGAYGGDAFDIWGQGTMVTVSS

SEQ ID NO: 1434 - protein, 118 aa, synthetic construct
  REGION 1..118: note = Non-Selective Anti-CLL-1 Full VH
QVQLVQSGAEVKKPGASVKVSCKASGYTFTDYYIHWVRQAPGQGLEWMGWMNPNSGNTGYAQKFQGRVTMTRDTSTSTVYMELSSLRSEDTAVYYCARVDTADYMDVWGKGTLVTVSS

SEQ ID NO: 1435 - protein, 118 aa, synthetic construct
  REGION 1..118: note = Non-Selective Anti-CLL-1 Full VH
QVQLVQSGAEVKKPGASVKVSCKASGGTFSTNAISWVRQAPGQGLEWMGWMNPNSGNTGYAQKFQGRVTMTRDTSTSTVYMELSSLRSEDTAVYYCAKEDYGGNFDYWGQGTLVTVSS

SEQ ID NO: 1436 - protein, 120 aa, synthetic construct
  REGION 1..120: note = Non-Selective Anti-CLL-1 Full VH
QVQLVQSGAEVKKPGASVKVSCKASGGAFSSYALSWVRQAPGQGLEWMGWMNPNSGNTGYAQKFQGRVTMTRDTSTSTVYMELSSLRSEDTAVYYCAADWMIGGDAFDIWGQGTTVTVSS

SEQ ID NO: 1437 - protein, 121 aa, synthetic construct
  REGION 1..121: note = Non-Selective Anti-CLL-1 Full VH
QVQLVQSGAEVKKPGASVKVSCKASGGTFSSYGVTWVRQAPGQGLEWMGWINPNTGGTDYAQNFQGRVTMTRDTSTSTVYMELSSLRSEDTAVYYCAGEVGVGGYDAFDIWGQGTTVTVSS

SEQ ID NO: 1438 - protein, 118 aa, synthetic construct
  REGION 1..118: note = Non-Selective Anti-CLL-1 Full VH
QVQLVQSGAEVKKPGASVKVSCKASGYTFTSYDINWVRQAPGQGLEWMGWMNPSSGDSGYAQKFQGRVTMTRDTSTSTVYMELSSLRSEDTAVYYCARPERSDAFDIWGQGTTVTVSS

SEQ ID NO: 1439 - protein, 118 aa, synthetic construct
  REGION 1..118: note = Non-Selective Anti-CLL-1 Full VH
QVQLVQSGAEVKKPGASVKVSCKASGYTFTGYFIHWVRQAPGQGLEWMGWMNPNSGNTGYAQKFQGRVTMTRDTSTSTVYMELSSLRSEDTAVYYCARGDYADWFDPWGQGTLVTVSS

SEQ ID NO: 1440 - protein, 118 aa, synthetic construct
  REGION 1..118: note = Non-Selective Anti-CLL-1 Full VH
QVQLVQSGAEVKKPGASVKVSCKASGYTFSDYYIHWVRQAPGQGLEWMGIINPSGGSTSYAQKFQGRVTMTRDTSTSTVYMELSSLRSEDTAVYYCARGMTDDAFDIWGQGTMVTVSS

SEQ ID NO: 1441 - protein, 118 aa, synthetic construct
  REGION 1..118: note = Non-Selective Anti-CLL-1 Full VH
QVQLVQSGAEVKKPGASVKVSCKASGDSFSSYGISWVRQAPGQGLEWMGWINPKSGATTSAQKFQGRVTMTRDTSTSTVYMELSSLRSEDTAVYYCARSTAFDAFDIWGQGTTVTVSS

SEQ ID NO: 1442 - protein, 118 aa, synthetic construct
  REGION 1..118: note = Non-Selective Anti-CLL-1 Full VH
QVQLVQSGAEVKKPGASVKVSCKASGYSFTANYIHWVRQAPGQGLEWMGIINPSGGSTSYAQKFQGRVTMTRDTSTSTVYMELSSLRSEDTAVYYCARGNYGDYVEDWGQGTLVTVSS

SEQ ID NO: 1443 - protein, 118 aa, synthetic construct
  REGION 1..118: note = Non-Selective Anti-CLL-1 Full VH
QVQLVQSGAEVKKPGASVKVSCKASGGTFTSYDINWVRQAPGQGLEWMGWINPHSGGTNYAQKFQGRVTMTRDTSTSTVYMELSSLRSEDTAVYYCARLVGGDAFDIWGQGTMVTVSS

SEQ ID NO: 1444 - protein, 118 aa, synthetic construct
  REGION 1..118: note = Non-Selective Anti-CLL-1 Full VH
QVQLVQSGAEVKKPGASVKVSCKASGYTFTSYDINWVRQAPGQGLEWMGMINPNSGGTSYAQKFQGRVTMTRDTSTSTVYMELSSLRSEDTAVYYCARELLGESFDYWGQGTLVTVSS

SEQ ID NO: 1445 - protein, 118 aa, synthetic construct
  REGION 1..118: note = Non-Selective Anti-CLL-1 Full VH
QVQLVQSGAEVKKPGASVKVSCKASGYTFTNYGISWVRQAPGQGLEWMGWINPNSGGTNFAQKFQGRVTMTRDTSTSTVYMELSSLRSEDTAVYYCARGTNGDELDYWGQGTLVTVSS

SEQ ID NO: 1446 - protein, 118 aa, synthetic construct
  REGION 1..118: note = Non-Selective Anti-CLL-1 Full VH
QVQLVQSGAEVKKPGASVKVSCKASGYTFTSYYMQWVRQAPGQGLEWMGWMNPNSGNTGYAQKFQGRVTMTRDTSTSTVYMELSSLRSEDTAVYYCARALYGDYLDIWGQGTTVTVSS

SEQ ID NO: 1447 - protein, 127 aa, synthetic construct
  REGION 1..127: note = Non-Selective Anti-CLL-1 Full VH
QVQLVQSGAEVKKPGASVKVSCKASGYTFTAHYIHWVRQAPGQGLEWMGIINPNGGRTTYAQKFQGRVTMTRDTSTSTVYMELSSLRSEDTAVYYCARDSDFWSGYYSDYYYGMDVWGQGTTVTVSS

SEQ ID NO: 1448 - protein, 118 aa, synthetic construct
  REGION 1..118: note = Non-Selective Anti-CLL-1 Full VH
QVQLVQSGAEVKKPGASVKVSCKASGYTFTSYDINWVRQAPGQGLEWMGWMNPNSGNTGYAQKFQGRVTMTRDTSTSTVYMELSSLRSEDTAVYYCARLSSGYYPDYWGQGTLVTVSS

SEQ ID NO: 1449 - protein, 118 aa, synthetic construct
  REGION 1..118: note = Non-Selective Anti-CLL-1 Full VH
QVQLVQSGAEVKKPGASVKVSCKASGYTFESYDMNWVRQAPGQGLEWMGWIDPHSGDTNFAQKFQGRVTMTRDTSTSTVYMELSSLRSEDTAVYYCARADYGGNADYWGQGTLVTVSS

SEQ ID NO: 1450 - protein, 118 aa, synthetic construct
  REGION 1..118: note = Non-Selective Anti-CLL-1 Full VH
QVQLVQSGAEVKKPGASVKVSCKASGYTFTSYYMHWVRQAPGQGLEWMGWINPNSGGTNYAQKFQGRVTMTRDTSTSTVYMELSSLRSEDTAVYYCARGTTGDDFDYWGQGTLVTVSS

SEQ ID NO: 1451 - protein, 118 aa, synthetic construct
  REGION 1..118: note = Non-Selective Anti-CLL-1 Full VH
QVQLVQSGAEVKKPGASVKVSCKASGYTFTNYGISWVRQAPGQGLEWMGWINPNSGGTNYAQKFQGRVTMTRDTSTSTVYMELSSLRSEDTAVYYCARVRSDDFFDYWGQGTLVTVSS

SEQ ID NO: 1452 - protein, 119 aa, synthetic construct
  REGION 1..119: note = Non-Selective Anti-CLL-1 Full VH
QVQLVQSGAEVKKPGASVKVSCKASGYTFTNDYIHWVRQAPGQGLEWMGWMSPNSGKTGFAQKFQGRVTMTRDTSTSTVYMELSSLRSEDTAVYYCAKDNSSGWYFDLWGRGTLVTVSS

SEQ ID NO: 1453 - protein, 118 aa, synthetic construct
  REGION 1..118: note = Non-Selective Anti-CLL-1 Full VH
QVQLVQSGAEVKKPGASVKVSCKASGGSFSNHGVSWVRQAPGQGLEWMGWMNPNSGDTGYAQKFQGRVTMTRDTSTSTVYMELSSLRSEDTAVYYCARPRKDDAFAIWGQGTLVTVSS

SEQ ID NO: 1454 - protein, 118 aa, synthetic construct
  REGION 1..118: note = Non-Selective Anti-CLL-1 Full VH
QVQLVQSGAEVKKPGASVKVSCKASGYTFTDYYIHWVRQAPGQGLEWMGMVDPNTGNINYAQTFQGRVTMTRDTSTSTVYMELSSLRSEDTAVYYCTSGSTNDAFDIWGQGTMVTVSS

SEQ ID NO: 1455 - protein, 118 aa, synthetic construct
  REGION 1..118: note = Non-Selective Anti-CLL-1 Full VH
QVQLVQSGAEVKKPGASVKVSCKASGYTFSDYYVHWVRQAPGQGLEWMGWMNPNSGNTGYAQKFQGRVTMTRDTSTSTVYMELSSLRSEDTAVYYCARGLTGDQFDYWGQGTLVTVSS

SEQ ID NO: 1456 - protein, 118 aa, synthetic construct
  REGION 1..118: note = Non-Selective Anti-CLL-1 Full VH
QVQLVQSGAEVKKPGASVKVSCKASGYTFNGYNMHWVRQAPGQGLEWMGWINPNSGDTNYAQKFQGRVTMTRDTSTSTVYMELSSLRSEDTAVYYCASLDYGDYAVYWGQGTLVTVSS

SEQ ID NO: 1457 - protein, 119 aa, synthetic construct
  REGION 1..119: note = Non-Selective Anti-CLL-1 Full VH
EVQLLESGGGLVQPGGSLRLSCAASGFIFRDHWMHWVRQAPGKGLEWVSSIDFSTGYIYYADSVKGRFTISRDNSKNTLYLQMNSLRAEDTAVYYCARDPWGDGDFDYWGRGTLVTVSS

SEQ ID NO: 1458 - protein, 121 aa, synthetic construct
  REGION 1..121: note = Non-Selective Anti-CLL-1 Full VH
QVQLVQSGAEVKKPGASVKVSCKASGYTFTSYDIHWVRQAPGQGLEWMGWINPNSGNTGYAQKFQGRVTMTRDTSTSTVYMELSSLRSEDTAVYYCAGGPDVDAAMVLDYWGQGTLVTVSS

SEQ ID NO: 1459 - protein, 118 aa, synthetic construct
  REGION 1..118: note = Non-Selective Anti-CLL-1 Full VH
QVQLVQSGAEVKKPGASVKVSCKASGGSFTSYYIHWVRQAPGQGLEWVGWMNPNSGNTGYAQKFQGRVTMTRDTSTSTVYMELSSLRSEDTAVYYCARGATDDAFDIWGQGTMVTVSS

SEQ ID NO: 1460 - protein, 118 aa, synthetic construct
  REGION 1..118: note = Non-Selective Anti-CLL-1 Full VH
QVQLVQSGAEVKKPGASVKVSCKASGYTFTSYYMHWVRQAPGQGLEWMGWMNPNSGNTGYAQKFQGRVTMTRDTSTSTVYMELSSLRSEDTAVYYCARSTYSDSFDYWGQGTLVTVSS

SEQ ID NO: 1461 - protein, 116 aa, synthetic construct
  REGION 1..116: note = Non-Selective Anti-CLL-1 Full VH
EVQLLESGGGLVQPGGSLRLSCAASGFTFSSSDMSWVRQAPGKGLEWVSSITGSGDGTYYADSVKGRFTISRDNSKNTLYLQMNSLRAEDTAVYYCIRDWEGIYQWGQGTLVTVSS

SEQ ID NO: 1462 - protein, 119 aa, synthetic construct
  REGION 1..119: note = Non-Selective Anti-CLL-1 Full VH
QVQLVQSGAEVKKPGASVKVSCKASGGTFSSYAISWVRQAPGQGLEWMGTINPSGGSTNYAQKFQGRVTMTRDTSTSTVYMELSSLRSEDTAVYYCAIGGYDSPYMDVWGKGTTVTVSS

SEQ ID NO: 1463 - protein, 118 aa, synthetic construct
  REGION 1..118: note = Non-Selective Anti-CLL-1 Full VH
QVQLVQSGAEVKKPGASVKVSCKASGYTFTSLDINWVRQAPGQGLEWMGSMNPRSGSTAYAQSFQGRVTMTRDTSTSTVYMELSSLRSEDTAVYYCAKSDYGDYLDYWGQGTLVTVSS

SEQ ID NO: 1464 - protein, 118 aa, synthetic construct
  REGION 1..118: note = Non-Selective Anti-CLL-1 Full VH
QVQLVQSGAEVKKPGASVKVSCKASGYTFTGYYMHWVRQAPGQGLEWMGVINPSGGSTSYAQKFQGRVTMTRDTSTSTVYMELSSLRSEDTAVYYCARGRTDDAFDIWGQGTLVTVSS

SEQ ID NO: 1465 - protein, 118 aa, synthetic construct
  REGION 1..118: note = Non-Selective Anti-CLL-1 Full VH
QVQLVQSGAEVKKPGASVKVSCKASGYTFTDYYMHWVRQAPGQGLEWLGIINTGAGTTNYAPKFQGRVTMTRDTSTSTVYMELSSLRSEDTAVYYCARGLTSDHFDYWGQGTLVTVSS

SEQ ID NO: 1466 - protein, 118 aa, synthetic construct
  REGION 1..118: note = Non-Selective Anti-CLL-1 Full VH
QVQLVQSGAEVKKPGSSVKVSCKASGGTFSSYAISWVRQAPGQGLEWMGGIIPKFGPPNYAPKFQGRVTITADESTSTAYMELSSLRSEDTAVYYCARNSYGDDFDYWGQGTLVTVSS

SEQ ID NO: 1467 - protein, 120 aa, synthetic construct
  REGION 1..120: note = Non-Selective Anti-CLL-1 Full VH
QVQLVQSGAEVKKPGASVKVSCKASGGTFGNYGINWVRQAPGQGLEWMGVINPSSGGTNLAQKFQGRVTMTRDTSTSTVYMELSSLRSEDTAVYYCARSLGWPSPYMDVWGQGTMVTVSS

SEQ ID NO: 1468 - protein, 119 aa, synthetic construct
  REGION 1..119: note = Non-Selective Anti-CLL-1 Full VH
EVQLLESGGGLVQPGGSLRLSCAASGFTFSNSDMYWVRQAPGKGLEWVSAISGSDGTTYYADSVKGRFTISRDNSKNTLYLQMNSLRAEDTAVYYCARDDYGDQGFDLWGRGTLVTVSS

SEQ ID NO: 1469 - protein, 125 aa, synthetic construct
  REGION 1..125: note = Non-Selective Anti-CLL-1 Full VH
QVQLVQSGAEVKKPGASVKVSCKASGYTFTKYYMHWVRQAPGQGLEWMGWINPNSGNTGYAQKFQGRVTMTRDTSTSTVYMELSSLRSEDTAVYYCARDIAVAGSTYYYYGMDVWGQGTTVTVSS

SEQ ID NO: 1470 - protein, 118 aa, synthetic construct
  REGION 1..118: note = Non-Selective Anti-CLL-1 Full VH
EVQLLESGGGLVQPGGSLRLSCAASGFTFSSYDMHWVRQAPGKGLEWVSSISSSSSYIYYADSVKGRFTISRDNSKNTLYLQMNSLRAEDTAVYYCARDIDDVAGDYWGQGTLVTVSS

SEQ ID NO: 1471 - protein, 124 aa, synthetic construct
  REGION 1..124: note = Non-Selective Anti-CLL-1 Full VH
EVQLLESGGGLVQPGGSLRLSCAASGFTFSSYGMHWVRQAPGKGLEWVSYTSSSSSTIYYADSVKGRFTISRDNSKNTLYLQMNSLRAEDTAVYYCARGNVGDNWNDDEAFLGWGQGTLVTVSS

SEQ ID NO: 1472 - protein, 118 aa, synthetic construct
  REGION 1..118: note = Non-Selective Anti-CLL-1 Full VH
EVQLLESGGGLVQPGGSLRLSCAASGLTAGSNYMSWVRQAPGKGLEWVSAISDDGHWTDYADSVKGRFTISRDNSKNTLYLQMNSLRAEDTAVYYCVKDDGEGSGIDWGQGTLVTVSS

SEQ ID NO: 1473 - protein, 126 aa, synthetic construct
  REGION 1..126: note = Non-Selective Anti-CLL-1 Full VH
EVQLLESGGGLVQPGGSLRLSCAASGFTFSSSWMHWVRQAPGKGLEWVSTINTNGDAAYYADSVKGRFTISRDNSKNTLYLQMNSLRAEDTAVYYCARDTVLDDYGDYDDYGMDVWGQGTTVTVSS

SEQ ID NO: 1474 - protein, 108 aa, synthetic construct
  REGION 1..108: note = Non-Selective Anti-CLL-1 Full VL
DIQMTQSPSSLSASVGDRVTITCRASQGISSYLAWYQQKPGKAPKLLIYDASSLQSGVPSRFSGSGSGTDFTLTISSLQPEDFATYYCQQSYSTPITFGPGTKVDIKR

SEQ ID NO: 1475 - protein, 108 aa, synthetic construct
  REGION 1..108: note = Non-Selective Anti-CLL-1 Full VL
DIQMTQSPSSLSASVGDRVTITCRVSQGISSYLNWYQQKPGKAPKLLIYDASNLQAGVPSRFSGSGSGTDFTLTISSLQPEDFATYYCQQSYSTPPTFGQGTKVEIKR

SEQ ID NO: 1476 - protein, 108 aa, synthetic construct
  REGION 1..108: note = Non-Selective Anti-CLL-1 Full VL
DIQMTQSPSSLSASVGDRVTITCRVSQGISSYLNWYQQKPGKAPKLLIYEASSLESGVPSRFSGSGSGTDFTLTISSLQPEDFATYYCQQSYSIPFTFGPGTKVDIKR

SEQ ID NO: 1477 - protein, 108 aa, synthetic construct
  REGION 1..108: note = Non-Selective Anti-CLL-1 Full VL
DIQMTQSPSSLSASVGDRVTITCRASQGISNYLAWYQQKPGKAPKLLIYDASNLETGVPSRFSGSGSGTDFTLTISSLQPEDFATYYCQQSYSTPLTFGGGTKVEIKR

SEQ ID NO: 1478 - protein, 108 aa, synthetic construct
  REGION 1..108: note = Non-Selective Anti-CLL-1 Full VL
DIQMTQSPSSLSASVGDRVTITCRASQSISTWVAWYQQKPGKAPKLLIYAASSLQSGVPSRFSGSGSGTDFTLTISSLQPEDFATYYCQQSFSIPLTFGQGTKVEIKR

SEQ ID NO: 1479 - protein, 108 aa, synthetic construct
  REGION 1..108: note = Non-Selective Anti-CLL-1 Full VL
DIQMTQSPSSLSASVGDRVTITCRASQSISSYLNWYQQKPGKAPKLLIYSASNLQSGVPSRFSGSGSGTDFTLTISSLQPEDFATYYCQQAISFPLTFGQGTKVEIKR

SEQ ID NO: 1480 - protein, 108 aa, synthetic construct
  REGION 1..108: note = Non-Selective Anti-CLL-1 Full VL
DIQMTQSPSSLSASVGDRVTITCRASQGISNNLNWYQQKPGKAPKLLIYDASHLDTGVPSRFSGSGSGTDFTLTISSLQPEDFATYYCQQNYSPPPTFGQGTRLEIKR

SEQ ID NO: 1481 - protein, 108 aa, synthetic construct
  REGION 1..108: note = Non-Selective Anti-CLL-1 Full VL
DIQMTQSPSSLSASVGDRVTITCRASQGISSWLAWYQQKPGKAPKLLIYDASNLQTGVPSRFSGSGSGTDFTLTISSLQPEDFATYYCQQSYSTPLTFGQGTKVEIKR

SEQ ID NO: 1482 - protein, 108 aa, synthetic construct
  REGION 1..108: note = Non-Selective Anti-CLL-1 Full VL
DIQMTQSPSSLSASVGDRVTITCRASQSIGPWLAWYQQKPGKAPKLLIYDASNLQAGVPSRFSGSGSGTDFTLTISSLQPEDFATYYCQQSHSLPLTFGPGTKVDIKR

SEQ ID NO: 1483 - protein, 108 aa, synthetic construct
  REGION 1..108: note = Non-Selective Anti-CLL-1 Full VL
DIQMTQSPSSLSASVGDRVTITCRASQSISSWLAWYQQKPGKAPKLLIYDASRLQSGVPSRFSGSGSGTDFTLTISSLQPEDFATYYCQQSYGIPLTFGGGTKVEIKR

SEQ ID NO: 1484 - protein, 108 aa, synthetic construct
  REGION 1..108: note = Non-Selective Anti-CLL-1 Full VL
DIQMTQSPSSLSASVGDRVTITCRASQGISNWLAWYQQKPGKAPKLLIYAASSLQSGVPSRFSGSGSGTDFTLTISSLQPEDFATYYCQQSYSIPLTFGGGTKVEIKR

SEQ ID NO: 1485 - protein, 108 aa, synthetic construct
  REGION 1..108: note = Non-Selective Anti-CLL-1 Full VL
DIQMTQSPSSLSASVGDRVTITCRASQSIGPWLAWYQQKPGKAPKLLIYDASNLEAGVPSRFSGSGSGTDFTLTISSLQPEDFATYYCQQSFSSPLTFGGGTKVEIKR

SEQ ID NO: 1486 - protein, 108 aa, synthetic construct
  REGION 1..108: note = Non-Selective Anti-CLL-1 Full VL
DIQMTQSPSSLSASVGDRVTITCRASQSISTWLAWYQQKPGKAPKLLIYDAFTLETGVPSRFSGSGSGTDFTLTISSLQPEDFATYYCQQSYSTPLTFGQGTKVEIKR

SEQ ID NO: 1487 - protein, 108 aa, synthetic construct
  REGION 1..108: note = Non-Selective Anti-CLL-1 Full VL
DIQMTQSPSSLSASVGDRVTITCRASQGISSWLAWYQQKPGKAPKLLIYDASNLETGVPSRFSGSGSGTDFTLTISSLQPEDFATYYCQQTYAIPLTFGGGTKLEIKR

SEQ ID NO: 1488 - protein, 108 aa, synthetic construct
  REGION 1..108: note = Non-Selective Anti-CLL-1 Full VL
DIQMTQSPSSLSASVGDRVTITCRASQSISSWLAWYQQKPGKAPKLLIYDASNLETGVPSRFSGSGSGTDFTLTISSLQPEDFATYYCQQSYSTPLTFGQGTKVEIKR

SEQ ID NO: 1489 - protein, 108 aa, synthetic construct
  REGION 1..108: note = Non-Selective Anti-CLL-1 Full VL
DIQMTQSPSSLSASVGDRVTITCRASQSISSWLAWYQQKPGKAPKLLIYDASNLETGVPSRFSGSGSGTDFTLTISSLQPEDFATYYCQQSYGTPLTFGGGTKVEIKR

SEQ ID NO: 1490 - protein, 108 aa, synthetic construct
  REGION 1..108: note = Non-Selective Anti-CLL-1 Full VL
DIQMTQSPSSLSASVGDRVTITCRASQSISSWLAWYQQKPGKAPKLLIYAASSLQGGVPSRFSGSGSGTDFTLTISSLQPEDFATYYCQQGYTTPLTFGPGTKVDIKR

SEQ ID NO: 1491 - protein, 108 aa, synthetic construct
  REGION 1..108: note = Non-Selective Anti-CLL-1 Full VL
DIQMTQSPSSLSASVGDRVTITCRASQGISSYLAWYQQKPGKAPKLLIYGASILQSGVPSRFSGSGSGTDFTLTISSLQPEDFATYYCQQSYSTSFTFGPGTKVDIKR

SEQ ID NO: 1492 - protein, 108 aa, synthetic construct
  REGION 1..108: note = Non-Selective Anti-CLL-1 Full VL
DIQMTQSPSSLSASVGDRVTITCRASQSISSYLAWYQQKPGKAPKLLIYAASTLQSGVPSRFSGSGSGTDFTLTISSLQPEDFATYYCQQSYSTPLTFGQGTRLEIKR

SEQ ID NO: 1493 - protein, 108 aa, synthetic construct
  REGION 1..108: note = Non-Selective Anti-CLL-1 Full VL
DIQMTQSPSSLSASVGDRVTITCRASQPIATWLAWYQQKPGKAPKLLIYDTSSLQSGVPSRFSGSGSGTDFTLTISSLQPEDFATYYCQQSYSLPLGFGQGTKVEIKR

SEQ ID NO: 1494 - protein, 108 aa, synthetic construct
  REGION 1..108: note = Non-Selective Anti-CLL-1 Full VL
DIQMTQSPSSLSASVGDRVTITCQASQDISNFLNWYQQKPGKAPKLLIYATSTLQSGVPSRFSGSGSGTDFTLTISSLQPEDFATYYCQQSYTTEWTFGQGTKVEIKR

SEQ ID NO: 1495 - protein, 108 aa, synthetic construct
  REGION 1..108: note = Non-Selective Anti-CLL-1 Full VL
DIQMTQSPSSLSASVGDRVTITCRASQFIANWLAWYQQKPGKAPKLLIYDASSLESGVPSRFSGSGSGTDFTLTISSLQPEDFATYYCQQSYSTPLTFGGGTKVEIKR

SEQ ID NO: 1496 - protein, 108 aa, synthetic construct
  REGION 1..108: note = Non-Selective Anti-CLL-1 Full VL
DIQMTQSPSSLSASVGDRVTITCRASQGISNWLAWYQQKPGKAPKLLIYDASNLETGVPSRFSGSGSGTDFTLTISSLQPEDFATYYCQQSYSTPYTFGQGTKVEIKR

SEQ ID NO: 1497 - protein, 108 aa, synthetic construct
  REGION 1..108: note = Non-Selective Anti-CLL-1 Full VL
DIQMTQSPSSLSASVGDRVTITCRASQDISTWLAWYQQKPGKAPKLLIYAASSLQSGVPSRFSGSGSGTDFTLTISSLQPEDFATYYCQQSYSIPPTFGPGTKVDIKR

SEQ ID NO: 1498 - protein, 108 aa, synthetic construct
  REGION 1..108: note = Non-Selective Anti-CLL-1 Full VL
DIQMTQSPSSLSASVGDRVTITCRASQSVNHWLAWYQQKPGKAPKLLIYAASTLQSGVPSRFSGSGSGTDFTLTISSLQPEDFATYYCQQSYSLPLTFGGGTKVEIKR

SEQ ID NO: 1499 - protein, 108 aa, synthetic construct
  REGION 1..108: note = Non-Selective Anti-CLL-1 Full VL
DIQMTQSPSSLSASVGDRVTITCRVSQGISSYLAWYQQKPGKAPKLLIYDASNLETGVPSRFSGSGSGTDFTLTISSLQPEDFATYYCQQYDTLPITFGQGTRLEIKR

SEQ ID NO: 1500 - protein, 108 aa, synthetic construct
  REGION 1..108: note = Non-Selective Anti-CLL-1 Full VL
DIQMTQSPSSLSASVGDRVTITCRASQSISSWLAWYQQKPGKAPKLLIYEASTLQSGVPSRFSGSGSGTDFTLTISSLQPEDFATYYCQQSYSTPLTFGQGTKVEIKR

SEQ ID NO: 1501 - protein, 108 aa, synthetic construct
  REGION 1..108: note = Non-Selective Anti-CLL-1 Full VL
DIQMTQSPSSLSASVGDRVTITCRASQSIGPWLAWYQQKPGKAPKLLIYEASNLASGVPSRFSGSGSGTDFTLTISSLQPEDFATYYCQQSYSTPLTFGGGTKVEIKR

SEQ ID NO: 1502 - protein, 108 aa, synthetic construct; identical to SEQ ID NO: 331
  REGION 1..108: note = Non-Selective Anti-CLL-1 Full VL

SEQ ID NO: 1503 - protein, 108 aa, synthetic construct
  REGION 1..108: note = Non-Selective Anti-CLL-1 Full VL
DIQMTQSPSSLSASVGDRVTITCRASQSISTWLAWYQQKPGKAPKLLIYDASSLRSGVPSRFSGSGSGTDFTLTISSLQPEDFATYYCQQSYSTPITFGQGTKVEIKR

SEQ ID NO: 1504 - protein, 108 aa, synthetic construct
  REGION 1..108: note = Non-Selective Anti-CLL-1 Full VL
DIQMTQSPSSLSASVGDRVTITCRASQSISSWLAWYQQKPGKAPKLLIYAASSLQSGVPSRFSGSGSGTDFTLTISSLQPEDFATYYCQQTYTTPYTFGQGTRLEIKR

SEQ ID NO: 1505 - protein, 108 aa, synthetic construct
  REGION 1..108: note = Non-Selective Anti-CLL-1 Full VL
DIQMTQSPSSLSASVGDRVTITCQASQDISNYLNWYQQKPGKAPKLLIYDASNLETGVPSRFSGSGSGTDFTLTISSLQPEDFATYYCQQADGFPPTFGGGTKVEIKR

SEQ ID NO: 1506 - protein, 108 aa, synthetic construct
  REGION 1..108: note = Non-Selective Anti-CLL-1 Full VL
DIQMTQSPSSLSASVGDRVTITCRASQNIDTWLAWYQQKPGKAPKLLIYDGSNLEAGVPSRFSGSGSGTDFTLTISSLQPEDFATYYCQQSYNTPITFGQGTRLEIKR

SEQ ID NO: 1507 - protein, 108 aa, synthetic construct
  REGION 1..108: note = Non-Selective Anti-CLL-1 Full VL
DIQMTQSPSSLSASVGDRVTITCRASQSISNWLAWYQQKPGKAPKLLIYDASNLETGVPSRFSGSGSGTDFTLTISSLQPEDFATYYCQQSYSTPLTFGQGTKLEIKR

SEQ ID NO: 1508 - protein, 108 aa, synthetic construct
  REGION 1..108: note = Non-Selective Anti-CLL-1 Full VL
DIQMTQSPSSLSASVGDRVTITCRVSQGISSYLNWYQQKPGKAPKLLIYDASNLETGVPSRFSGSGSGTDFTLTISSLQPEDFATYYCQQGYSTPWTFGQGTKLEIKR

SEQ ID NO: 1509 - protein, 108 aa, synthetic construct
  REGION 1..108: note = Non-Selective Anti-CLL-1 Full VL
DIQMTQSPSSLSASVGDRVTITCQASQDISNYLNWYQQKPGKAPKLLIYDASNLETGVPSRFSGSGSGTDFTLTISSLQPEDFATYYCQQGYSPPWTFGGGTKVEIKR

SEQ ID NO: 1510 - protein, 108 aa, synthetic construct
  REGION 1..108: note = Non-Selective Anti-CLL-1 Full VL
DIQMTQSPSSLSASVGDRVTITCRASQSISPWLAWYQQKPGKAPKLLIYDASNLQSGVPSRFSGSGSGTDFTLTISSLQPEDFATYYCQQSYSTPLTFGQGTKLEIKR

SEQ ID NO: 1511 - protein, 108 aa, synthetic construct
  REGION 1..108: note = Non-Selective Anti-CLL-1 Full VL
DIQMTQSPSSLSASVGDRVTITCRASQTISSWLAWYQQKPGKAPKLLIYAASTLQSGVPSRFSGSGSGTDFTLTISSLQPEDFATYYCQQSYSIPLTFGGGTKLEIKR

SEQ ID NO: 1512 - protein, 108 aa, synthetic construct
  REGION 1..108: note = Non-Selective Anti-CLL-1 Full VL
DIQMTQSPSSLSASVGDRVTITCRASQNIGPWLAWYQQKPGKAPKLLIYEAFTLQSGVPSRFSGSGSGTDFTLTISSLQPEDFATYYCQQSDNIPITFGQGTKVEIKR

SEQ ID NO: 1513 - protein, 108 aa, synthetic construct
  REGION 1..108: note = Non-Selective Anti-CLL-1 Full VL
DIQMTQSPSSLSASVGDRVTITCRASQSISSWLAWYQQKPGKAPKLLIYAASSLQRGVPSRFSGSGSGTDFTLTISSLQPEDFATYYCQQSYSTPLTFGQGTKVEIKR

SEQ ID NO: 1514 - protein, 108 aa, synthetic construct
  REGION 1..108: note = Non-Selective Anti-CLL-1 Full VL
DIQMTQSPSSLSASVGDRVTITCRASQSISRYLNWYQQKPGKAPKLLIYDASNLETGVPSRFSGSGSGTDFTLTISSLQPEDFATYYCQQSYSTPWTFGQGTKLEIKR

SEQ ID NO: 1515 - protein, 108 aa, synthetic construct
  REGION 1..108: note = Non-Selective Anti-CLL-1 Full VL
DIQMTQSPSSLSASVGDRVTITCRASQDIRNDLGWYQQKPGKAPKLLIYDASNLQTGVPSRFSGSGSGTDFTLTISSLQPEDFATYYCQQSYNMPYTFGQGTKLEIKR

SEQ ID NO: 1516 - protein, 108 aa, synthetic construct
  REGION 1..108: note = Non-Selective Anti-CLL-1 Full VL
DIQMTQSPSSLSASVGDRVTITCQASQDISNYLNWYQQKPGKAPKLLIYDATNLETGVPSRFSGSGSGTDFTLTISSLQPEDFATYYCQQSYSTPPTFGGGTKVEIKR

SEQ ID NO: 1517 - protein, 108 aa, synthetic construct
  REGION 1..108: note = Non-Selective Anti-CLL-1 Full VL
DIQMTQSPSSLSASVGDRVTITCQASQDISNYLNWYQQKPGKAPKLLIYGASSLQSGVPSRFSGSGSGTDFTLTISSLQPEDFATYYCQQSYSTPFTFGQGTKLEIKR

SEQ ID NO: 1518 - protein, 108 aa, synthetic construct
  REGION 1..108: note = Non-Selective Anti-CLL-1 Full VL
DIQMTQSPSSLSASVGDRVTITCQASQDISNYLNWYQQKPGKAPKLLIYDASNLETGVPSRFSGSGSGTDFTLTISSLQPEDFATYYCQQTYDTPYTFGQGTKLEIKR

SEQ ID NO: 1519 - protein, 108 aa, synthetic construct
  REGION 1..108: note = Non-Selective Anti-CLL-1 Full VL
DIQMTQSPSSLSASVGDRVTITCRASQGISDYLAWYQQKPGKAPKLLIYGASSLQSGVPSRFSGSGSGTDFTLTISSLQPEDFATYYCQQSYSTPWTFGPGTKVDIKR

SEQ ID NO: 1520 - protein, 109 aa, synthetic construct
  REGION 1..109: note = Non-Selective Anti-CLL-1 Full VL
EIVMTQSPATLSVSPGERATLSCRASQSVSSSYLAWYQQKPGQAPRLLIYGASTRAAGIPARFSGSGSGTEFTLTISSLQSEDFAVYYCQQYGSSPFTFGPGTKVDIKR

SEQ ID NO: 1521 - protein, 21 aa, synthetic construct
  REGION 1..21: note = CD8alphasignal peptide (variant 1)
MALPVTALLLPLALLLHAARP

SEQ ID NO: 1522 - protein, 19 aa, synthetic construct
  REGION 1..19: note = CD8alpha signal peptide (variant 2)
MALPVTALLLPLALLLHAA

SEQ ID NO: 1523 - protein, 11 aa, synthetic construct
  REGION 1..11: note = CD8alpha signal peptide (variant 3)
MALPVTALLLP

SEQ ID NO: 1524 - protein, 12 aa, synthetic construct
  REGION 1..12: note = CD8alpha signal peptide (variant 4)
PVTALLLPLALL

SEQ ID NO: 1525 - protein, 14 aa, synthetic construct
  REGION 1..14: note = CD8alpha signal peptide (variant 5)
LLLPLALLLHAARP

SEQ ID NO: 1526 - protein, 45 aa, synthetic construct
  REGION 1..45: note = CD8alphahinge
TTTPAPRPPTPAPTIASQPLSLRPEACRPAAGGAVHTRGLDFACD

SEQ ID NO: 1527 - protein, 27 aa, synthetic construct
  REGION 1..27: note = CD28 Transmembrane (Tm) domain
FWVLVVVGGVLACYSLLVTVAFIIFWV

SEQ ID NO: 1528 - protein, 235 aa, synthetic construct
  REGION 1..235: note = Surface glycoprotein CD8 alpha chain isoform 1 precursor(NP_001139345.1)
MALPVTALLLPLALLLHAARPSQFRVSPLDRTWNLGETVELKCQVLLSNPTSGCSWLFQPRGAAASPTFLLYLSQNKPKAAEGLDTQRFSGKRLGDTFVLTLSDFRRENEGYYFCSALSNSIMYFSHFVPVFLPAKPTTTPAPRPPTPAPTIASQPLSLRPEACRPAAGGAVHTRGLDFACDIYIWAPLAGTCGVLLLSLVITLYCNHRNRRRVCKCPRPVVKSGDKPSLSARYV

SEQ ID NO: 1529 - protein, 42 aa, synthetic construct
  REGION 1..42: note = 4-1BB costimulatory domain
KRGRKKLLYIFKQPFMRPVQTTQEEDGCSCRFPEEEEGGCEL

SEQ ID NO: 1530 - protein, 41 aa, synthetic construct
  REGION 1..41: note = CD28 costimulatory domain
RSKRSRLLHSDYMNMTPRRPGPTRKHYQPYAPPRDFAAYRS

SEQ ID NO: 1531 - protein, 112 aa, synthetic construct
  REGION 1..112: note = CD3 zeta
RVKFSRSADAPAYKQGQNQLYNELNLGRREEYDVLDKRRGRDPEMGGKPRRKNPQEGLYNELQKDKMAEAYSEIGMKGERRRGKGHDGLYQGLSTATKDTYDALHMQALPPR

SEQ ID NO: 1532 - protein, 22 aa, synthetic construct
  REGION 1..22: note = P2A peptide
GSGATNFSLLKQAGDVEENPGP

SEQ ID NO: 1533 - protein, 5 aa, synthetic construct
  REGION 1..5: note = (GGGGS) linker
GGGGS

SEQ ID NO: 1534 - protein, 10 aa, synthetic construct
  REGION 1..10: note = (GGGGS)2 linker
GGGGSGGGGS

SEQ ID NO: 1535 - protein, 15 aa, synthetic construct
  REGION 1..15: note = (GGGGS)3 linker
GGGGSGGGGSGGGGS

SEQ ID NO: 1536 - protein, 20 aa, synthetic construct
  REGION 1..20: note = (GGGGS)4 linker
GGGGSGGGGSGGGGSGGGGS

SEQ ID NO: 1537 - protein, 308 aa, synthetic construct
  REGION 1..308: note = hCD34
MPRGWTALCLLSLLPSGFMSLDNNGTATPELPTQGTFSNVSTNVSYQETTTPSTLGSTSLHPVSQHGNEATTNITETTVKFTSTSVITSVYGNTNSSVQSQTSVISTVFTTPANVSTPETTLKPSLSPGNVSDLSTTSTSLATSPTKPYTSSSPILSDIKAEIKCSGIREVKLTQGICLEQNKTSSCAEFKKDRGEGLARVLCGEEQADADAGAQVCSLLLAQSEVRPQCLLLVLANRTEISSKLQLMKKHQSDLKKLGILDFTEQDVASHQSYSQKTLIALVTSGALLAVLGITGYFLMNRRSWSPI

SEQ ID NO: 1538 - protein, 710 aa, synthetic construct
  REGION 1..710: note = hCD34 Human-Herpes Simplex Virus-1 (HSV) - thymidine kinase (TK)
MPRGWTALCLLSLLPSGFMSLDNNGTATPELPTQGTFSNVSTNVSYQETTTPSTLGSTSLHPVSQHGNEATTNITETTVKFTSTSVITSVYGNTNSSVQSQTSVISTVFTTPANVSTPETTLKPSLSPGNVSDLSTTSTSLATSPTKPYTSSSPILSDIKAEIKCSGIREVKLTQGICLEQNKTSSCAEFKKDRGEGLARVLCGEEQADADAGAQVCSLLLAQSEVRPQCLLLVLANRTEISSKLQLMKKHQSDLKKLGILDFTEQDVASHQSYSQKTLIALVTSGALLAVLGITGYFLMNRRSWSPTGEGGGGGDLGGVKLPHLFGKRLVEARMASYPCHQHASAFDQAARSRGHSNRRTALRPRRQQEATEVRLEQKMPTLLRVYIDGPHGMGKTTTTQLLVALGSRDDIVYVPEPMTYWQVLGASETIANIYTTQHRLDQGEISAGDAAVVMTSAQITMGMPYAVTDAVLAPHVGGEAGSSHAPPPALTLLLDRHPIAVMLCYPAARYLMGSMTPQAVLAFVALIPPTLPGTNIVLGALPEDRHIDRLAKRQRPGERLDLAMLAAIRRVYGLLANTVRYLQGGGSWWEDWGQLSGTAVPPQGAEPQSNAGPRPHIGDTLFTLFRAPELLAPNGDLYNVFAWALDVLAKRLRPMHVFILDYDQSPAGCRDALLQLTSGMVQTHVTTPGSIPTICDLARTFAREMGEAN

SEQ ID NO: 1539 - protein, 496 aa, synthetic construct
  REGION 1..496: note = CAR Sequence
MALPVTALLLPLALLLHAARPDIQMTQSPSSLSASVGDRVTITCRASQTINDWLAWYQQKPGKAPKLLIYSASTLHSGVPSRFSGSGSGTDFTLTISSLQPEDFATYYCQQAYSTPWTFGQGTKVEIKRTTTPAPRPPTPAPTIASQPLSLRPEACRPAAGGAVHTRGLDFACDQVQLVQSGAEVKKPGASVKVSCKASGYSFTGYYIHWVRQAPGQGLEWMGWINPNSGGTNYAQKFQGRVTMTRDTSTSTVYMELSSLRSEDTAVYYCARDQWDGYNSGYFDYWGQGTLVTVSSGGGGSGGGGSGGGGSGGGGSFWVLVVVGGVLACYSLLVTVAFIIFWVRSKRSRLLHSDYMNMTPRRPGPTRKHYQPYAPPRDFAAYRSRVKFSRSADAPAYKQGQNQLYNELNLGRREEYDVLDKRRGRDPEMGGKPRRKNPQEGLYNELQKDKMAEAYSEIGMKGERRRGKGHDGLYQGLSTATKDTYDALHMQALPPR

SEQ ID NO: 1540 - protein, 497 aa, synthetic construct
  REGION 1..497: note = CAR Sequence
MALPVTALLLPLALLLHAARPDIQMTQSPSSLSASVGDRVTITCRASQTINDWLAWYQQKPGKAPKLLIYSASTLHSGVPSRFSGSGSGTDFTLTISSLQPEDFATYYCQQAYSTPWTFGQGTKVEIKRTTTPAPRPPTPAPTIASQPLSLRPEACRPAAGGAVHTRGLDFACDQVQLVQSGAEVKKPGASVKVSCKASGYSFTGYYIHWVRQAPGQGLEWMGWINPNSGGTNYAQKFQGRVTMTRDTSTSTVYMELSSLRSEDTAVYYCARDQWDGYNSGYFDYWGQGTLVTVSSGGGGSGGGGSGGGGSGGGGSFWVLVVVGGVLACYSLLVTVAFIIFWVKRGRKKLLYIFKQPFMRPVQTTQEEDGCSCRFPEEEEGGCELRVKFSRSADAPAYKQGQNQLYNELNLGRREEYDVLDKRRGRDPEMGGKPRRKNPQEGLYNELQKDKMAEAYSEIGMKGERRRGKGHDGLYQGLSTATKDTYDALHMQALPPR

SEQ ID NO: 1541 - protein, 538 aa, synthetic construct
  REGION 1..538: note = CAR Sequence
MALPVTALLLPLALLLHAARPDIQMTQSPSSLSASVGDRVTITCRASQTINDWLAWYQQKPGKAPKLLIYSASTLHSGVPSRFSGSGSGTDFTLTISSLQPEDFATYYCQQAYSTPWTFGQGTKVEIKRTTTPAPRPPTPAPTIASQPLSLRPEACRPAAGGAVHTRGLDFACDQVQLVQSGAEVKKPGASVKVSCKASGYSFTGYYIHWVRQAPGQGLEWMGWINPNSGGTNYAQKFQGRVTMTRDTSTSTVYMELSSLRSEDTAVYYCARDQWDGYNSGYFDYWGQGTLVTVSSGGGGSGGGGSGGGGSGGGGSFWVLVVVGGVLACYSLLVTVAFIIFWVRSKRSRLLHSDYMNMTPRRPGPTRKHYQPYAPPRDFAAYRSKRGRKKLLYIFKQPFMRPVQTTQEEDGCSCRFPEEEEGGCELRVKFSRSADAPAYKQGQNQLYNELNLGRREEYDVLDKRRGRDPEMGGKPRRKNPQEGLYNELQKDKMAEAYSEIGMKGERRRGKGHDGLYQGLSTATKDTYDALHMQALPPR

SEQ ID NO: 1542 - protein, 501 aa, synthetic construct
  REGION 1..501: note = CAR Sequence
MALPVTALLLPLALLLHAARPDIVMTQSPLSLPVTPGEPASISCRSSQSLLHSNGYNYLDWYLQKPGQSPQLLIYLGSDRASGVPDRFSGSGSGTDFTLKISRVEAEDVGVYYCMQGLQTPITFGQGTRLEIKRTTTPAPRPPTPAPTIASQPLSLRPEACRPAAGGAVHTRGLDFACDQVQLVQSGAEVKKPGASVKVSCKASGNTFTSYGISWVRQAPGQGLEWMGWINPNSGGTKYAQKFQGRVTMTRDTSTSTVYMELSSLRSEDTAVYYCARESWFGELYYGMDVWGKGTTVTVSSGGGGSGGGGSGGGGSGGGGSFWVLVVVGGVLACYSLLVTVAFIIFWVRSKRSRLLHSDYMNMTPRRPGPTRKHYQPYAPPRDFAAYRSRVKFSRSADAPAYKQGQNQLYNELNLGRREEYDVLDKRRGRDPEMGGKPRRKNPQEGLYNELQKDKMAEAYSEIGMKGERRRGKGHDGLYQGLSTATKDTYDALHMQALPPR

SEQ ID NO: 1543 - protein, 502 aa, synthetic construct
  REGION 1..502: note = CAR Sequence
MALPVTALLLPLALLLHAARPDIVMTQSPLSLPVTPGEPASISCRSSQSLLHSNGYNYLDWYLQKPGQSPQLLIYLGSDRASGVPDRFSGSGSGTDFTLKISRVEAEDVGVYYCMQGLQTPITFGQGTRLEIKRTTTPAPRPPTPAPTIASQPLSLRPEACRPAAGGAVHTRGLDFACDQVQLVQSGAEVKKPGASVKVSCKASGNTFTSYGISWVRQAPGQGLEWMGWINPNSGGTKYAQKFQGRVTMTRDTSTSTVYMELSSLRSEDTAVYYCARESWFGELYYGMDVWGKGTTVTVSSGGGGSGGGGSGGGGSGGGGSFWVLVVVGGVLACYSLLVTVAFIIFWVKRGRKKLLYIFKQPFMRPVQTTQEEDGCSCRFPEEEEGGCELRVKFSRSADAPAYKQGQNQLYNELNLGRREEYDVLDKRRGRDPEMGGKPRRKNPQEGLYNELQKDKMAEAYSEIGMKGERRRGKGHDGLYQGLSTATKDTYDALHMQALPPR

SEQ ID NO: 1544 - protein, 543 aa, synthetic construct
  REGION 1..543: note = CAR Sequence
MALPVTALLLPLALLLHAARPDIVMTQSPLSLPVTPGEPASISCRSSQSLLHSNGYNYLDWYLQKPGQSPQLLIYLGSDRASGVPDRFSGSGSGTDFTLKISRVEAEDVGVYYCMQGLQTPITFGQGTRLEIKRTTTPAPRPPTPAPTIASQPLSLRPEACRPAAGGAVHTRGLDFACDQVQLVQSGAEVKKPGASVKVSCKASGNTFTSYGISWVRQAPGQGLEWMGWINPNSGGTKYAQKFQGRVTMTRDTSTSTVYMELSSLRSEDTAVYYCARESWFGELYYGMDVWGKGTTVTVSSGGGGSGGGGSGGGGSGGGGSFWVLVVVGGVLACYSLLVTVAFIIFWVRSKRSRLLHSDYMNMTPRRPGPTRKHYQPYAPPRDFAAYRSKRGRKKLLYIFKQPFMRPVQTTQEEDGCSCRFPEEEEGGCELRVKFSRSADAPAYKQGQNQLYNELNLGRREEYDVLDKRRGRDPEMGGKPRRKNPQEGLYNELQKDKMAEAYSEIGMKGERRRGKGHDGLYQGLSTATKDTYDALHMQALPPR

SEQ ID NO: 1545 - protein, 491 aa, synthetic construct
  REGION 1..491: note = CAR Sequence
MALPVTALLLPLALLLHAARPDIQMTQSPSSLSASVGDRVTITCRASQSISSYLNWYQQKPGKAPKLLIYEASTLETGVPSRFSGSGSGTDFTLTISSLQPEDFATYYCQQANSFPFTFGPGTKVDIKRTTTPAPRPPTPAPTIASQPLSLRPEACRPAAGGAVHTRGLDFACDQVQLVQSGAEVKKPGASVKVSCKASGYTFTAYYTHWVRQAPGQGLEWMGWMNPNSGHTSYAQKFQGRVTMTRDTSTSTVYMELSSLRSEDTAVYYCAREAYDSFDYWGQGTLVTVSSGGGGSGGGGSGGGGSGGGGSFWVLVVVGGVLACYSLLVTVAFIIFWVRSKRSRLLHSDYMNMTPRRPGPTRKHYQPYAPPRDFAAYRSRVKFSRSADAPAYKQGQNQLYNELNLGRREEYDVLDKRRGRDPEMGGKPRRKNPQEGLYNELQKDKMAEAYSEIGMKGERRRGKGHDGLYQGLSTATKDTYDALHMQALPPR

SEQ ID NO: 1546 - protein, 492 aa, synthetic construct
  REGION 1..492: note = CAR Sequence
MALPVTALLLPLALLLHAARPDIQMTQSPSSLSASVGDRVTITCRASQSISSYLNWYQQKPGKAPKLLIYEASTLETGVPSRFSGSGSGTDFTLTISSLQPEDFATYYCQQANSFPFTFGPGTKVDIKRTTTPAPRPPTPAPTIASQPLSLRPEACRPAAGGAVHTRGLDFACDQVQLVQSGAEVKKPGASVKVSCKASGYTFTAYYTHWVRQAPGQGLEWMGWMNPNSGHTSYAQKFQGRVTMTRDTSTSTVYMELSSLRSEDTAVYYCAREAYDSFDYWGQGTLVTVSSGGGGSGGGGSGGGGSGGGGSFWVLVVVGGVLACYSLLVTVAFIIFWVKRGRKKLLYIFKQPFMRPVQTTQEEDGCSCRFPEEEEGGCELRVKFSRSADAPAYKQGQNQLYNELNLGRREEYDVLDKRRGRDPEMGGKPRRKNPQEGLYNELQKDKMAEAYSEIGMKGERRRGKGHDGLYQGLSTATKDTYDALHMQALPPR

SEQ ID NO: 1547 - protein, 533 aa, synthetic construct
  REGION 1..533: note = CAR Sequence
MALPVTALLLPLALLLHAARPDIQMTQSPSSLSASVGDRVTITCRASQSISSYLNWYQQKPGKAPKLLIYEASTLETGVPSRFSGSGSGTDFTLTISSLQPEDFATYYCQQANSFPFTFGPGTKVDIKRTTTPAPRPPTPAPTIASQPLSLRPEACRPAAGGAVHTRGLDFACDQVQLVQSGAEVKKPGASVKVSCKASGYTFTAYYTHWVRQAPGQGLEWMGWMNPNSGHTSYAQKFQGRVTMTRDTSTSTVYMELSSLRSEDTAVYYCAREAYDSFDYWGQGTLVTVSSGGGGSGGGGSGGGGSGGGGSFWVLVVVGGVLACYSLLVTVAFIIFWVRSKRSRLLHSDYMNMTPRRPGPTRKHYQPYAPPRDFAAYRSKRGRKKLLYIFKQPFMRPVQTTQEEDGCSCRFPEEEEGGCELRVKFSRSADAPAYKQGQNQLYNELNLGRREEYDVLDKRRGRDPEMGGKPRRKNPQEGLYNELQKDKMAEAYSEIGMKGERRRGKGHDGLYQGLSTATKDTYDALHMQALPPR

SEQ ID NO: 1548 - protein, 496 aa, synthetic construct
  REGION 1..496: note = CAR Sequence
MALPVTALLLPLALLLHAARPDIQMTQSPSSLSASVGDRVTITCRASRGINNWLTWYQQKPGKAPKLLIYGASSLQSGVPSRFSGSGSGTDFTLTISSLQPEDFATYYCQQSYRIPYTFGQGTKLEIKRTTTPAPRPPTPAPTIASQPLSLRPEACRPAAGGAVHTRGLDFACDQVQLVQSGAEVKKPGASVKVSCKASGYTFTDYYMHWVRQAPGQGLEWMGWINPNSGGTNYAQKFQGRVTMTRDTSTSTVYMELSSLRSEDTAVYYCARDSRIAVAASSFDYWGQGTLVTVSSGGGGSGGGGSGGGGSGGGGSFWVLVVVGGVLACYSLLVTVAFIIFWVRSKRSRLLHSDYMNMTPRRPGPTRKHYQPYAPPRDFAAYRSRVKFSRSADAPAYKQGQNQLYNELNLGRREEYDVLDKRRGRDPEMGGKPRRKNPQEGLYNELQKDKMAEAYSEIGMKGERRRGKGHDGLYQGLSTATKDTYDALHMQALPPR

SEQ ID NO: 1549 - protein, 497 aa, synthetic construct
  REGION 1..497: note = CAR Sequence
MALPVTALLLPLALLLHAARPDIQMTQSPSSLSASVGDRVTITCRASRGINNWLTWYQQKPGKAPKLLIYGASSLQSGVPSRFSGSGSGTDFTLTISSLQPEDFATYYCQQSYRIPYTFGQGTKLEIKRTTTPAPRPPTPAPTIASQPLSLRPEACRPAAGGAVHTRGLDFACDQVQLVQSGAEVKKPGASVKVSCKASGYTFTDYYMHWVRQAPGQGLEWMGWINPNSGGTNYAQKFQGRVTMTRDTSTSTVYMELSSLRSEDTAVYYCARDSRIAVAASSFDYWGQGTLVTVSSGGGGSGGGGSGGGGSGGGGSFWVLVVVGGVLACYSLLVTVAFIIFWVKRGRKKLLYIFKQPFMRPVQTTQEEDGCSCRFPEEEEGGCELRVKFSRSADAPAYKQGQNQLYNELNLGRREEYDVLDKRRGRDPEMGGKPRRKNPQEGLYNELQKDKMAEAYSEIGMKGERRRGKGHDGLYQGLSTATKDTYDALHMQALPPR

SEQ ID NO: 1550 - protein, 538 aa, synthetic construct
  REGION 1..538: note = CAR Sequence
MALPVTALLLPLALLLHAARPDIQMTQSPSSLSASVGDRVTITCRASRGINNWLTWYQQKPGKAPKLLIYGASSLQSGVPSRFSGSGSGTDFTLTISSLQPEDFATYYCQQSYRIPYTFGQGTKLEIKRTTTPAPRPPTPAPTIASQPLSLRPEACRPAAGGAVHTRGLDFACDQVQLVQSGAEVKKPGASVKVSCKASGYTFTDYYMHWVRQAPGQGLEWMGWINPNSGGTNYAQKFQGRVTMTRDTSTSTVYMELSSLRSEDTAVYYCARDSRIAVAASSFDYWGQGTLVTVSSGGGGSGGGGSGGGGSGGGGSFWVLVVVGGVLACYSLLVTVAFIIFWVRSKRSRLLHSDYMNMTPRRPGPTRKHYQPYAPPRDFAAYRSKRGRKKLLYIFKQPFMRPVQTTQEEDGCSCRFPEEEEGGCELRVKFSRSADAPAYKQGQNQLYNELNLGRREEYDVLDKRRGRDPEMGGKPRRKNPQEGLYNELQKDKMAEAYSEIGMKGERRRGKGHDGLYQGLSTATKDTYDALHMQALPPR

SEQ ID NO: 1551 - protein, 493 aa, synthetic construct
  REGION 1..493: note = CAR Sequence
MALPVTALLLPLALLLHAARPDIQMTQSPSSLSASVGDRVTITCRASQSINDWLAWYQQKPGKAPKLLIYAASNLQSGVPSRFSGSGSGTDFTLTISSLQPEDFATYYCQQGYSTPPTFGQGTKVEIKRTTTPAPRPPTPAPTIASQPLSLRPEACRPAAGGAVHTRGLDFACDQVQLVQSGAEVKKPGASVKVSCKASGYTFTGYYMHWVRQAPGQGLEWMGRINPNGGSTTYAQKFQGRVTMTRDTSTSTVYMELSSLRSEDTAVYYCARDDFYYYYLDFWGKGTTVTVSSGGGGSGGGGSGGGGSGGGGSFWVLVVVGGVLACYSLLVTVAFIIFWVRSKRSRLLHSDYMNMTPRRPGPTRKHYQPYAPPRDFAAYRSRVKFSRSADAPAYKQGQNQLYNELNLGRREEYDVLDKRRGRDPEMGGKPRRKNPQEGLYNELQKDKMAEAYSEIGMKGERRRGKGHDGLYQGLSTATKDTYDALHMQALPPR

SEQ ID NO: 1552 - protein, 494 aa, synthetic construct
  REGION 1..494: note = CAR Sequence
MALPVTALLLPLALLLHAARPDIQMTQSPSSLSASVGDRVTITCRASQSINDWLAWYQQKPGKAPKLLIYAASNLQSGVPSRFSGSGSGTDFTLTISSLQPEDFATYYCQQGYSTPPTFGQGTKVEIKRTTTPAPRPPTPAPTIASQPLSLRPEACRPAAGGAVHTRGLDFACDQVQLVQSGAEVKKPGASVKVSCKASGYTFTGYYMHWVRQAPGQGLEWMGRINPNGGSTTYAQKFQGRVTMTRDTSTSTVYMELSSLRSEDTAVYYCARDDFYYYYLDFWGKGTTVTVSSGGGGSGGGGSGGGGSGGGGSFWVLVVVGGVLACYSLLVTVAFIIFWVKRGRKKLLYIFKQPFMRPVQTTQEEDGCSCRFPEEEEGGCELRVKFSRSADAPAYKQGQNQLYNELNLGRREEYDVLDKRRGRDPEMGGKPRRKNPQEGLYNELQKDKMAEAYSEIGMKGERRRGKGHDGLYQGLSTATKDTYDALHMQALPPR

SEQ ID NO: 1553 - protein, 535 aa, synthetic construct
  REGION 1..535: note = CAR Sequence
MALPVTALLLPLALLLHAARPDIQMTQSPSSLSASVGDRVTITCRASQSINDWLAWYQQKPGKAPKLLIYAASNLQSGVPSRFSGSGSGTDFTLTISSLQPEDFATYYCQQGYSTPPTFGQGTKVEIKRTTTPAPRPPTPAPTIASQPLSLRPEACRPAAGGAVHTRGLDFACDQVQLVQSGAEVKKPGASVKVSCKASGYTFTGYYMHWVRQAPGQGLEWMGRINPNGGSTTYAQKFQGRVTMTRDTSTSTVYMELSSLRSEDTAVYYCARDDFYYYYLDFWGKGTTVTVSSGGGGSGGGGSGGGGSGGGGSFWVLVVVGGVLACYSLLVTVAFIIFWVRSKRSRLLHSDYMNMTPRRPGPTRKHYQPYAPPRDFAAYRSKRGRKKLLYIFKQPFMRPVQTTQEEDGCSCRFPEEEEGGCELRVKFSRSADAPAYKQGQNQLYNELNLGRREEYDVLDKRRGRDPEMGGKPRRKNPQEGLYNELQKDKMAEAYSEIGMKGERRRGKGHDGLYQGLSTATKDTYDALHMQALPPR

SEQ ID NO: 1554 - protein, 494 aa, synthetic construct
  REGION 1..494: note = CAR Sequence
MALPVTALLLPLALLLHAARPDIQMTQSPSSLSASVGDRVTITCRASQSISSWLAWYQQKPGKAPKLLIYGASSLQSGVPSRFSGSGSGTDFTLTISSLQPEDFATYYCQQTYRTPLTFGPGTKVDIKRTTTPAPRPPTPAPTIASQPLSLRPEACRPAAGGAVHTRGLDFACDQVQLVQSGAEVKKPGASVKVSCKASGYTFSNYYMHWVRQAPGQGLEWMGWMNPDSGTTGYAQKFQGRVTMTRDTSTSTVYMELSSLRSEDTAVYYCVRDGTMVQGIFDYWGQGTLVTVSSGGGGSGGGGSGGGGSGGGGSFWVLVVVGGVLACYSLLVTVAFIIFWVRSKRSRLLHSDYMNMTPRRPGPTRKHYQPYAPPRDFAAYRSRVKFSRSADAPAYKQGQNQLYNELNLGRREEYDVLDKRRGRDPEMGGKPRRKNPQEGLYNELQKDKMAEAYSEIGMKGERRRGKGHDGLYQGLSTATKDTYDALHMQALPPR

SEQ ID NO: 1555 - protein, 495 aa, synthetic construct
  REGION 1..495: note = CAR Sequence
MALPVTALLLPLALLLHAARPDIQMTQSPSSLSASVGDRVTITCRASQSISSWLAWYQQKPGKAPKLLIYGASSLQSGVPSRFSGSGSGTDFTLTISSLQPEDFATYYCQQTYRTPLTFGPGTKVDIKRTTTPAPRPPTPAPTIASQPLSLRPEACRPAAGGAVHTRGLDFACDQVQLVQSGAEVKKPGASVKVSCKASGYTFSNYYMHWVRQAPGQGLEWMGWMNPDSGTTGYAQKFQGRVTMTRDTSTSTVYMELSSLRSEDTAVYYCVRDGTMVQGIFDYWGQGTLVTVSSGGGGSGGGGSGGGGSGGGGSFWVLVVVGGVLACYSLLVTVAFIIFWVKRGRKKLLYIFKQPFMRPVQTTQEEDGCSCRFPEEEEGGCELRVKFSRSADAPAYKQGQNQLYNELNLGRREEYDVLDKRRGRDPEMGGKPRRKNPQEGLYNELQKDKMAEAYSEIGMKGERRRGKGHDGLYQGLSTATKDTYDALHMQALPPR

SEQ ID NO: 1556 - protein, 536 aa, synthetic construct
  REGION 1..536: note = CAR Sequence
MALPVTALLLPLALLLHAARPDIQMTQSPSSLSASVGDRVTITCRASQSISSWLAWYQQKPGKAPKLLIYGASSLQSGVPSRFSGSGSGTDFTLTISSLQPEDFATYYCQQTYRTPLTFGPGTKVDIKRTTTPAPRPPTPAPTIASQPLSLRPEACRPAAGGAVHTRGLDFACDQVQLVQSGAEVKKPGASVKVSCKASGYTFSNYYMHWVRQAPGQGLEWMGWMNPDSGTTGYAQKFQGRVTMTRDTSTSTVYMELSSLRSEDTAVYYCVRDGTMVQGIFDYWGQGTLVTVSSGGGGSGGGGSGGGGSGGGGSFWVLVVVGGVLACYSLLVTVAFIIFWVRSKRSRLLHSDYMNMTPRRPGPTRKHYQPYAPPRDFAAYRSKRGRKKLLYIFKQPFMRPVQTTQEEDGCSCRFPEEEEGGCELRVKFSRSADAPAYKQGQNQLYNELNLGRREEYDVLDKRRGRDPEMGGKPRRKNPQEGLYNELQKDKMAEAYSEIGMKGERRRGKGHDGLYQGLSTATKDTYDALHMQALPPR

SEQ ID NO: 1557 - protein, 492 aa, synthetic construct
  REGION 1..492: note = CAR Sequence
MALPVTALLLPLALLLHAARPDIQMTQSPSSLSASVGDRVTITCRASQGIGNDLGWYQQKPGKAPKLLIYGASSVQSGVPSRFSGSGSGTDFTLTISSLQPEDFATYYCQQSYSTPITFGQGTRLEIKRTTTPAPRPPTPAPTIASQPLSLRPEACRPAAGGAVHTRGLDFACDQVQLVQSGAEVKKPGSSVKVSCKASGGTFSTYAITWVRQAPGQGLEWMGGIIPIVGRANYAQKFQGRVTITADESTSTAYMELSSLRSEDTAVYYCARSGGHDLDYWGQGTLVTVSSGGGGSGGGGSGGGGSGGGGSFWVLVVVGGVLACYSLLVTVAFIIFWVKRGRKKLLYIFKQPFMRPVQTTQEEDGCSCRFPEEEEGGCELRVKFSRSADAPAYKQGQNQLYNELNLGRREEYDVLDKRRGRDPEMGGKPRRKNPQEGLYNELQKDKMAEAYSEIGMKGERRRGKGHDGLYQGLSTATKDTYDALHMQALPPR

SEQ ID NO: 1558 - protein, 533 aa, synthetic construct
  REGION 1..533: note = CAR Sequence
MALPVTALLLPLALLLHAARPDIQMTQSPSSLSASVGDRVTITCRASQGIGNDLGWYQQKPGKAPKLLIYGASSVQSGVPSRFSGSGSGTDFTLTISSLQPEDFATYYCQQSYSTPITFGQGTRLEIKRTTTPAPRPPTPAPTIASQPLSLRPEACRPAAGGAVHTRGLDFACDQVQLVQSGAEVKKPGSSVKVSCKASGGTFSTYAITWVRQAPGQGLEWMGGIIPIVGRANYAQKFQGRVTITADESTSTAYMELSSLRSEDTAVYYCARSGGHDLDYWGQGTLVTVSSGGGGSGGGGSGGGGSGGGGSFWVLVVVGGVLACYSLLVTVAFIIFWVRSKRSRLLHSDYMNMTPRRPGPTRKHYQPYAPPRDFAAYRSKRGRKKLLYIFKQPFMRPVQTTQEEDGCSCRFPEEEEGGCELRVKFSRSADAPAYKQGQNQLYNELNLGRREEYDVLDKRRGRDPEMGGKPRRKNPQEGLYNELQKDKMAEAYSEIGMKGERRRGKGHDGLYQGLSTATKDTYDALHMQALPPR

SEQ ID NO: 1559 - protein, 491 aa, synthetic construct
  REGION 1..491: note = CAR Sequence
MALPVTALLLPLALLLHAARPDIQMTQSPSSLSASVGDRVTITCRASQGIGNDLGWYQQKPGKAPKLLIYGASSVQSGVPSRFSGSGSGTDFTLTISSLQPEDFATYYCQQSYSTPITFGQGTRLEIKRTTTPAPRPPTPAPTIASQPLSLRPEACRPAAGGAVHTRGLDFACDQVQLVQSGAEVKKPGSSVKVSCKASGGTFSTYAITWVRQAPGQGLEWMGGIIPIVGRANYAQKFQGRVTITADESTSTAYMELSSLRSEDTAVYYCARSGGHDLDYWGQGTLVTVSSGGGGSGGGGSGGGGSGGGGSFWVLVVVGGVLACYSLLVTVAFIIFWVRSKRSRLLHSDYMNMTPRRPGPTRKHYQPYAPPRDFAAYRSRVKFSRSADAPAYKQGQNQLYNELNLGRREEYDVLDKRRGRDPEMGGKPRRKNPQEGLYNELQKDKMAEAYSEIGMKGERRRGKGHDGLYQGLSTATKDTYDALHMQALPPR

SEQ ID NO: 1560 - protein, 498 aa, synthetic construct
  REGION 1..498: note = CAR Sequence
MALPVTALLLPLALLLHAARPEIVMTQSPATLSVSPGERATLSCRASQSVSSSYLAWYQQKPGQAPRLLIYATSTRATGIPARFSGSGSGTEFTLTISSLQSEDFAVYYCQQYGSLPLTFGQGTKVEIKRTTTPAPRPPTPAPTIASQPLSLRPEACRPAAGGAVHTRGLDFACDEVQLLESGGGLVQPGGSLRLSCAASGFTFSSYGMHWVRQAPGKGLEWVSSISGSGDTTYYADSVKGRFTISRDNSKNTLYLQMNSLRAEDTAVYYCARDNPYGDYGGSFDYWGQGTLVTVSSGGGGSGGGGSGGGGSGGGGSFWVLVVVGGVLACYSLLVTVAFIIFWVKRGRKKLLYIFKQPFMRPVQTTQEEDGCSCRFPEEEEGGCELRVKFSRSADAPAYKQGQNQLYNELNLGRREEYDVLDKRRGRDPEMGGKPRRKNPQEGLYNELQKDKMAEAYSEIGMKGERRRGKGHDGLYQGLSTATKDTYDALHMQALPPR

SEQ ID NO: 1561 - protein, 539 aa, synthetic construct
  REGION 1..539: note = CAR Sequence
MALPVTALLLPLALLLHAARPEIVMTQSPATLSVSPGERATLSCRASQSVSSSYLAWYQQKPGQAPRLLIYATSTRATGIPARFSGSGSGTEFTLTISSLQSEDFAVYYCQQYGSLPLTFGQGTKVEIKRTTTPAPRPPTPAPTIASQPLSLRPEACRPAAGGAVHTRGLDFACDEVQLLESGGGLVQPGGSLRLSCAASGFTFSSYGMHWVRQAPGKGLEWVSSISGSGDTTYYADSVKGRFTISRDNSKNTLYLQMNSLRAEDTAVYYCARDNPYGDYGGSFDYWGQGTLVTVSSGGGGSGGGGSGGGGSGGGGSFWVLVVVGGVLACYSLLVTVAFIIFWVRSKRSRLLHSDYMNMTPRRPGPTRKHYQPYAPPRDFAAYRSKRGRKKLLYIFKQPFMRPVQTTQEEDGCSCRFPEEEEGGCELRVKFSRSADAPAYKQGQNQLYNELNLGRREEYDVLDKRRGRDPEMGGKPRRKNPQEGLYNELQKDKMAEAYSEIGMKGERRRGKGHDGLYQGLSTATKDTYDALHMQALPPR

SEQ ID NO: 1562 - protein, 497 aa, synthetic construct
  REGION 1..497: note = CAR Sequence
MALPVTALLLPLALLLHAARPEIVMTQSPATLSVSPGERATLSCRASQSVSSSYLAWYQQKPGQAPRLLIYATSTRATGIPARFSGSGSGTEFTLTISSLQSEDFAVYYCQQYGSLPLTFGQGTKVEIKRTTTPAPRPPTPAPTIASQPLSLRPEACRPAAGGAVHTRGLDFACDEVQLLESGGGLVQPGGSLRLSCAASGFTFSSYGMHWVRQAPGKGLEWVSSISGSGDTTYYADSVKGRFTISRDNSKNTLYLQMNSLRAEDTAVYYCARDNPYGDYGGSFDYWGQGTLVTVSSGGGGSGGGGSGGGGSGGGGSFWVLVVVGGVLACYSLLVTVAFIIFWVRSKRSRLLHSDYMNMTPRRPGPTRKHYQPYAPPRDFAAYRSRVKFSRSADAPAYKQGQNQLYNELNLGRREEYDVLDKRRGRDPEMGGKPRRKNPQEGLYNELQKDKMAEAYSEIGMKGERRRGKGHDGLYQGLSTATKDTYDALHMQALPPR

SEQ ID NO: 1563 - protein, 497 aa, synthetic construct
  REGION 1..497: note = CAR Sequence
MALPVTALLLPLALLLHAARPDIQMTQSPSSLSASVGDRVTITCRASQGISNNLNWYQQKPGKAPKLLIYDASNLETGVPSRFSGSGSGTDFTLTISSLQPEDFATYYCQQANSFPLTFGPGTKVDIKRTTTPAPRPPTPAPTIASQPLSLRPEACRPAAGGAVHTRGLDFACDQVQLVQSGAEVKKPGASVKVSCKASGYTFTSYYMHWVRQAPGQGLEWMGIIDPSGGSTNYAQKFQGRVTMTRDTSTSTVYMELSSLRSEDTAVYYCARDYYGSGSYYGLDYWGRGTLVTVSSGGGGSGGGGSGGGGSGGGGSFWVLVVVGGVLACYSLLVTVAFIIFWVKRGRKKLLYIFKQPFMRPVQTTQEEDGCSCRFPEEEEGGCELRVKFSRSADAPAYKQGQNQLYNELNLGRREEYDVLDKRRGRDPEMGGKPRRKNPQEGLYNELQKDKMAEAYSEIGMKGERRRGKGHDGLYQGLSTATKDTYDALHMQALPPR

SEQ ID NO: 1564 - protein, 538 aa, synthetic construct
  REGION 1..538: note = CAR Sequence
MALPVTALLLPLALLLHAARPDIQMTQSPSSLSASVGDRVTITCRASQGISNNLNWYQQKPGKAPKLLIYDASNLETGVPSRFSGSGSGTDFTLTISSLQPEDFATYYCQQANSFPLTFGPGTKVDIKRTTTPAPRPPTPAPTIASQPLSLRPEACRPAAGGAVHTRGLDFACDQVQLVQSGAEVKKPGASVKVSCKASGYTFTSYYMHWVRQAPGQGLEWMGIIDPSGGSTNYAQKFQGRVTMTRDTSTSTVYMELSSLRSEDTAVYYCARDYYGSGSYYGLDYWGRGTLVTVSSGGGGSGGGGSGGGGSGGGGSFWVLVVVGGVLACYSLLVTVAFIIFWVRSKRSRLLHSDYMNMTPRRPGPTRKHYQPYAPPRDFAAYRSKRGRKKLLYIFKQPFMRPVQTTQEEDGCSCRFPEEEEGGCELRVKFSRSADAPAYKQGQNQLYNELNLGRREEYDVLDKRRGRDPEMGGKPRRKNPQEGLYNELQKDKMAEAYSEIGMKGERRRGKGHDGLYQGLSTATKDTYDALHMQALPPR

SEQ ID NO: 1565 - protein, 496 aa, synthetic construct
  REGION 1..496: note = CAR Sequence
MALPVTALLLPLALLLHAARPDIQMTQSPSSLSASVGDRVTITCRASQGISNNLNWYQQKPGKAPKLLIYDASNLETGVPSRFSGSGSGTDFTLTISSLQPEDFATYYCQQANSFPLTFGPGTKVDIKRTTTPAPRPPTPAPTIASQPLSLRPEACRPAAGGAVHTRGLDFACDQVQLVQSGAEVKKPGASVKVSCKASGYTFTSYYMHWVRQAPGQGLEWMGIIDPSGGSTNYAQKFQGRVTMTRDTSTSTVYMELSSLRSEDTAVYYCARDYYGSGSYYGLDYWGRGTLVTVSSGGGGSGGGGSGGGGSGGGGSFWVLVVVGGVLACYSLLVTVAFIIFWVRSKRSRLLHSDYMNMTPRRPGPTRKHYQPYAPPRDFAAYRSRVKFSRSADAPAYKQGQNQLYNELNLGRREEYDVLDKRRGRDPEMGGKPRRKNPQEGLYNELQKDKMAEAYSEIGMKGERRRGKGHDGLYQGLSTATKDTYDALHMQALPPR

SEQ ID NO: 1566 - protein, 497 aa, synthetic construct
  REGION 1..497: note = CAR Sequence
MALPVTALLLPLALLLHAARPDIQMTQSPSSLSASVGDRVTITCRASQGISNYLAWYQQKPGKAPKLLIYTASTLQSGVPSRFSGSGSGTDFTLTISSLQPEDFATYYCQQSYSTPLTFGGGTKVEIKRTTTPAPRPPTPAPTIASQPLSLRPEACRPAAGGAVHTRGLDFACDQVQLVQSGAEVKKPGASVKVSCKASGYSFTSHAISWVRQAPGQGLEWMGWIKPNSGDTKYAQKFQGRVTMTRDTSTSTVYMELSSLRSEDTAVYYCARGSDDYYGSYYFDYWGQGTLVTVSSGGGGSGGGGSGGGGSGGGGSFWVLVVVGGVLACYSLLVTVAFIIFWVKRGRKKLLYIFKQPFMRPVQTTQEEDGCSCRFPEEEEGGCELRVKFSRSADAPAYKQGQNQLYNELNLGRREEYDVLDKRRGRDPEMGGKPRRKNPQEGLYNELQKDKMAEAYSEIGMKGERRRGKGHDGLYQGLSTATKDTYDALHMQALPPR

SEQ ID NO: 1567 - protein, 538 aa, synthetic construct
  REGION 1..538: note = CAR Sequence
MALPVTALLLPLALLLHAARPDIQMTQSPSSLSASVGDRVTITCRASQGISNYLAWYQQKPGKAPKLLIYTASTLQSGVPSRFSGSGSGTDFTLTISSLQPEDFATYYCQQSYSTPLTFGGGTKVEIKRTTTPAPRPPTPAPTIASQPLSLRPEACRPAAGGAVHTRGLDFACDQVQLVQSGAEVKKPGASVKVSCKASGYSFTSHAISWVRQAPGQGLEWMGWIKPNSGDTKYAQKFQGRVTMTRDTSTSTVYMELSSLRSEDTAVYYCARGSDDYYGSYYFDYWGQGTLVTVSSGGGGSGGGGSGGGGSGGGGSFWVLVVVGGVLACYSLLVTVAFIIFWVRSKRSRLLHSDYMNMTPRRPGPTRKHYQPYAPPRDFAAYRSKRGRKKLLYIFKQPFMRPVQTTQEEDGCSCRFPEEEEGGCELRVKFSRSADAPAYKQGQNQLYNELNLGRREEYDVLDKRRGRDPEMGGKPRRKNPQEGLYNELQKDKMAEAYSEIGMKGERRRGKGHDGLYQGLSTATKDTYDALHMQALPPR

SEQ ID NO: 1568 - protein, 496 aa, synthetic construct
  REGION 1..496: note = CAR Sequence
MALPVTALLLPLALLLHAARPDIQMTQSPSSLSASVGDRVTITCRASQGISNYLAWYQQKPGKAPKLLIYTASTLQSGVPSRFSGSGSGTDFTLTISSLQPEDFATYYCQQSYSTPLTFGGGTKVEIKRTTTPAPRPPTPAPTIASQPLSLRPEACRPAAGGAVHTRGLDFACDQVQLVQSGAEVKKPGASVKVSCKASGYSFTSHAISWVRQAPGQGLEWMGWIKPNSGDTKYAQKFQGRVTMTRDTSTSTVYMELSSLRSEDTAVYYCARGSDDYYGSYYFDYWGQGTLVTVSSGGGGSGGGGSGGGGSGGGGSFWVLVVVGGVLACYSLLVTVAFIIFWVRSKRSRLLHSDYMNMTPRRPGPTRKHYQPYAPPRDFAAYRSRVKFSRSADAPAYKQGQNQLYNELNLGRREEYDVLDKRRGRDPEMGGKPRRKNPQEGLYNELQKDKMAEAYSEIGMKGERRRGKGHDGLYQGLSTATKDTYDALHMQALPPR

SEQ ID NO: 1569 - protein, 496 aa, synthetic construct
  REGION 1..496: note = CAR Sequence
MALPVTALLLPLALLLHAARPQVQLVQSGAEVKKPGASVKVSCKASGYSFTGYYIHWVRQAPGQGLEWMGWINPNSGGTNYAQKFQGRVTMTRDTSTSTVYMELSSLRSEDTAVYYCARDQWDGYNSGYFDYWGQGTLVTVSSTTTPAPRPPTPAPTIASQPLSLRPEACRPAAGGAVHTRGLDFACDDIQMTQSPSSLSASVGDRVTITCRASQTINDWLAWYQQKPGKAPKLLIYSASTLHSGVPSRFSGSGSGTDFTLTISSLQPEDFATYYCQQAYSTPWTFGQGTKVEIKRGGGGSGGGGSGGGGSGGGGSFWVLVVVGGVLACYSLLVTVAFIIFWVRSKRSRLLHSDYMNMTPRRPGPTRKHYQPYAPPRDFAAYRSRVKFSRSADAPAYKQGQNQLYNELNLGRREEYDVLDKRRGRDPEMGGKPRRKNPQEGLYNELQKDKMAEAYSEIGMKGERRRGKGHDGLYQGLSTATKDTYDALHMQALPPR

SEQ ID NO: 1570 - protein, 497 aa, synthetic construct
  REGION 1..497: note = CAR Sequence
MALPVTALLLPLALLLHAARPQVQLVQSGAEVKKPGASVKVSCKASGYSFTGYYIHWVRQAPGQGLEWMGWINPNSGGTNYAQKFQGRVTMTRDTSTSTVYMELSSLRSEDTAVYYCARDQWDGYNSGYFDYWGQGTLVTVSSTTTPAPRPPTPAPTIASQPLSLRPEACRPAAGGAVHTRGLDFACDDIQMTQSPSSLSASVGDRVTITCRASQTINDWLAWYQQKPGKAPKLLIYSASTLHSGVPSRFSGSGSGTDFTLTISSLQPEDFATYYCQQAYSTPWTFGQGTKVEIKRGGGGSGGGGSGGGGSGGGGSFWVLVVVGGVLACYSLLVTVAFIIFWVKRGRKKLLYIFKQPFMRPVQTTQEEDGCSCRFPEEEEGGCELRVKFSRSADAPAYKQGQNQLYNELNLGRREEYDVLDKRRGRDPEMGGKPRRKNPQEGLYNELQKDKMAEAYSEIGMKGERRRGKGHDGLYQGLSTATKDTYDALHMQALPPR

SEQ ID NO: 1571 - protein, 538 aa, synthetic construct
  REGION 1..538: note = CAR Sequence
MALPVTALLLPLALLLHAARPQVQLVQSGAEVKKPGASVKVSCKASGYSFTGYYIHWVRQAPGQGLEWMGWINPNSGGTNYAQKFQGRVTMTRDTSTSTVYMELSSLRSEDTAVYYCARDQWDGYNSGYFDYWGQGTLVTVSSTTTPAPRPPTPAPTIASQPLSLRPEACRPAAGGAVHTRGLDFACDDIQMTQSPSSLSASVGDRVTITCRASQTINDWLAWYQQKPGKAPKLLIYSASTLHSGVPSRFSGSGSGTDFTLTISSLQPEDFATYYCQQAYSTPWTFGQGTKVEIKRGGGGSGGGGSGGGGSGGGGSFWVLVVVGGVLACYSLLVTVAFIIFWVRSKRSRLLHSDYMNMTPRRPGPTRKHYQPYAPPRDFAAYRSKRGRKKLLYIFKQPFMRPVQTTQEEDGCSCRFPEEEEGGCELRVKFSRSADAPAYKQGQNQLYNELNLGRREEYDVLDKRRGRDPEMGGKPRRKNPQEGLYNELQKDKMAEAYSEIGMKGERRRGKGHDGLYQGLSTATKDTYDALHMQALPPR

SEQ ID NO: 1572 - protein, 501 aa, synthetic construct
  REGION 1..501: note = CAR Sequence
MALPVTALLLPLALLLHAARPQVQLVQSGAEVKKPGASVKVSCKASGNTFTSYGISWVRQAPGQGLEWMGWINPNSGGTKYAQKFQGRVTMTRDTSTSTVYMELSSLRSEDTAVYYCARESWFGELYYGMDVWGKGTTVTVSSTTTPAPRPPTPAPTIASQPLSLRPEACRPAAGGAVHTRGLDFACDDIVMTQSPLSLPVTPGEPASISCRSSQSLLHSNGYNYLDWYLQKPGQSPQLLIYLGSDRASGVPDRFSGSGSGTDFTLKISRVEAEDVGVYYCMQGLQTPITFGQGTRLEIKRGGGGSGGGGSGGGGSGGGGSFWVLVVVGGVLACYSLLVTVAFIIFWVRSKRSRLLHSDYMNMTPRRPGPTRKHYQPYAPPRDFAAYRSRVKFSRSADAPAYKQGQNQLYNELNLGRREEYDVLDKRRGRDPEMGGKPRRKNPQEGLYNELQKDKMAEAYSEIGMKGERRRGKGHDGLYQGLSTATKDTYDALHMQALPPR

SEQ ID NO: 1573 - protein, 502 aa, synthetic construct
  REGION 1..502: note = CAR Sequence
MALPVTALLLPLALLLHAARPQVQLVQSGAEVKKPGASVKVSCKASGNTFTSYGISWVRQAPGQGLEWMGWINPNSGGTKYAQKFQGRVTMTRDTSTSTVYMELSSLRSEDTAVYYCARESWFGELYYGMDVWGKGTTVTVSSTTTPAPRPPTPAPTIASQPLSLRPEACRPAAGGAVHTRGLDFACDDIVMTQSPLSLPVTPGEPASISCRSSQSLLHSNGYNYLDWYLQKPGQSPQLLIYLGSDRASGVPDRFSGSGSGTDFTLKISRVEAEDVGVYYCMQGLQTPITFGQGTRLEIKRGGGGSGGGGSGGGGSGGGGSFWVLVVVGGVLACYSLLVTVAFIIFWVKRGRKKLLYIFKQPFMRPVQTTQEEDGCSCRFPEEEEGGCELRVKFSRSADAPAYKQGQNQLYNELNLGRREEYDVLDKRRGRDPEMGGKPRRKNPQEGLYNELQKDKMAEAYSEIGMKGERRRGKGHDGLYQGLSTATKDTYDALHMQALPPR

SEQ ID NO: 1574 - protein, 543 aa, synthetic construct
  REGION 1..543: note = CAR Sequence
MALPVTALLLPLALLLHAARPQVQLVQSGAEVKKPGASVKVSCKASGNTFTSYGISWVRQAPGQGLEWMGWINPNSGGTKYAQKFQGRVTMTRDTSTSTVYMELSSLRSEDTAVYYCARESWFGELYYGMDVWGKGTTVTVSSTTTPAPRPPTPAPTIASQPLSLRPEACRPAAGGAVHTRGLDFACDDIVMTQSPLSLPVTPGEPASISCRSSQSLLHSNGYNYLDWYLQKPGQSPQLLIYLGSDRASGVPDRFSGSGSGTDFTLKISRVEAEDVGVYYCMQGLQTPITFGQGTRLEIKRGGGGSGGGGSGGGGSGGGGSFWVLVVVGGVLACYSLLVTVAFIIFWVRSKRSRLLHSDYMNMTPRRPGPTRKHYQPYAPPRDFAAYRSKRGRKKLLYIFKQPFMRPVQTTQEEDGCSCRFPEEEEGGCELRVKFSRSADAPAYKQGQNQLYNELNLGRREEYDVLDKRRGRDPEMGGKPRRKNPQEGLYNELQKDKMAEAYSEIGMKGERRRGKGHDGLYQGLSTATKDTYDALHMQALPPR

SEQ ID NO: 1575 - protein, 491 aa, synthetic construct
  REGION 1..491: note = CAR Sequence
MALPVTALLLPLALLLHAARPQVQLVQSGAEVKKPGASVKVSCKASGYTFTAYYTHWVRQAPGQGLEWMGWMNPNSGHTSYAQKFQGRVTMTRDTSTSTVYMELSSLRSEDTAVYYCAREAYDSFDYWGQGTLVTVSSTTTPAPRPPTPAPTIASQPLSLRPEACRPAAGGAVHTRGLDFACDDIQMTQSPSSLSASVGDRVTITCRASQSISSYLNWYQQKPGKAPKLLIYEASTLETGVPSRFSGSGSGTDFTLTISSLQPEDFATYYCQQANSFPFTFGPGTKVDIKRGGGGSGGGGSGGGGSGGGGSFWVLVVVGGVLACYSLLVTVAFIIFWVRSKRSRLLHSDYMNMTPRRPGPTRKHYQPYAPPRDFAAYRSRVKFSRSADAPAYKQGQNQLYNELNLGRREEYDVLDKRRGRDPEMGGKPRRKNPQEGLYNELQKDKMAEAYSEIGMKGERRRGKGHDGLYQGLSTATKDTYDALHMQALPPR

SEQ ID NO: 1576 - protein, 492 aa, synthetic construct
  REGION 1..492: note = CAR Sequence
MALPVTALLLPLALLLHAARPQVQLVQSGAEVKKPGASVKVSCKASGYTFTAYYTHWVRQAPGQGLEWMGWMNPNSGHTSYAQKFQGRVTMTRDTSTSTVYMELSSLRSEDTAVYYCAREAYDSFDYWGQGTLVTVSSTTTPAPRPPTPAPTIASQPLSLRPEACRPAAGGAVHTRGLDFACDDIQMTQSPSSLSASVGDRVTITCRASQSISSYLNWYQQKPGKAPKLLIYEASTLETGVPSRFSGSGSGTDFTLTISSLQPEDFATYYCQQANSFPFTFGPGTKVDIKRGGGGSGGGGSGGGGSGGGGSFWVLVVVGGVLACYSLLVTVAFIIFWVKRGRKKLLYIFKQPFMRPVQTTQEEDGCSCRFPEEEEGGCELRVKFSRSADAPAYKQGQNQLYNELNLGRREEYDVLDKRRGRDPEMGGKPRRKNPQEGLYNELQKDKMAEAYSEIGMKGERRRGKGHDGLYQGLSTATKDTYDALHMQALPPR

SEQ ID NO: 1577 - protein, 533 aa, synthetic construct
  REGION 1..533: note = CAR Sequence
MALPVTALLLPLALLLHAARPQVQLVQSGAEVKKPGASVKVSCKASGYTFTAYYTHWVRQAPGQGLEWMGWMNPNSGHTSYAQKFQGRVTMTRDTSTSTVYMELSSLRSEDTAVYYCAREAYDSFDYWGQGTLVTVSSTTTPAPRPPTPAPTIASQPLSLRPEACRPAAGGAVHTRGLDFACDDIQMTQSPSSLSASVGDRVTITCRASQSISSYLNWYQQKPGKAPKLLIYEASTLETGVPSRFSGSGSGTDFTLTISSLQPEDFATYYCQQANSFPFTFGPGTKVDIKRGGGGSGGGGSGGGGSGGGGSFWVLVVVGGVLACYSLLVTVAFIIFWVRSKRSRLLHSDYMNMTPRRPGPTRKHYQPYAPPRDFAAYRSKRGRKKLLYIFKQPFMRPVQTTQEEDGCSCRFPEEEEGGCELRVKFSRSADAPAYKQGQNQLYNELNLGRREEYDVLDKRRGRDPEMGGKPRRKNPQEGLYNELQKDKMAEAYSEIGMKGERRRGKGHDGLYQGLSTATKDTYDALHMQALPPR

SEQ ID NO: 1578 - protein, 496 aa, synthetic construct
  REGION 1..496: note = CAR Sequence
MALPVTALLLPLALLLHAARPQVQLVQSGAEVKKPGASVKVSCKASGYTFTDYYMHWVRQAPGQGLEWMGWINPNSGGTNYAQKFQGRVTMTRDTSTSTVYMELSSLRSEDTAVYYCARDSRIAVAASSFDYWGQGTLVTVSSTTTPAPRPPTPAPTIASQPLSLRPEACRPAAGGAVHTRGLDFACDDIQMTQSPSSLSASVGDRVTITCRASRGINNWLTWYQQKPGKAPKLLIYGASSLQSGVPSRFSGSGSGTDFTLTISSLQPEDFATYYCQQSYRIPYTFGQGTKLEIKRGGGGSGGGGSGGGGSGGGGSFWVLVVVGGVLACYSLLVTVAFIIFWVRSKRSRLLHSDYMNMTPRRPGPTRKHYQPYAPPRDFAAYRSRVKFSRSADAPAYKQGQNQLYNELNLGRREEYDVLDKRRGRDPEMGGKPRRKNPQEGLYNELQKDKMAEAYSEIGMKGERRRGKGHDGLYQGLSTATKDTYDALHMQALPPR

SEQ ID NO: 1579 - protein, 497 aa, synthetic construct
  REGION 1..497: note = CAR Sequence
MALPVTALLLPLALLLHAARPQVQLVQSGAEVKKPGASVKVSCKASGYTFTDYYMHWVRQAPGQGLEWMGWINPNSGGTNYAQKFQGRVTMTRDTSTSTVYMELSSLRSEDTAVYYCARDSRIAVAASSFDYWGQGTLVTVSSTTTPAPRPPTPAPTIASQPLSLRPEACRPAAGGAVHTRGLDFACDDIQMTQSPSSLSASVGDRVTITCRASRGINNWLTWYQQKPGKAPKLLIYGASSLQSGVPSRFSGSGSGTDFTLTISSLQPEDFATYYCQQSYRIPYTFGQGTKLEIKRGGGGSGGGGSGGGGSGGGGSFWVLVVVGGVLACYSLLVTVAFIIFWVKRGRKKLLYIFKQPFMRPVQTTQEEDGCSCRFPEEEEGGCELRVKFSRSADAPAYKQGQNQLYNELNLGRREEYDVLDKRRGRDPEMGGKPRRKNPQEGLYNELQKDKMAEAYSEIGMKGERRRGKGHDGLYQGLSTATKDTYDALHMQALPPR

SEQ ID NO: 1580 - protein, 538 aa, synthetic construct
  REGION 1..538: note = CAR Sequence
MALPVTALLLPLALLLHAARPQVQLVQSGAEVKKPGASVKVSCKASGYTFTDYYMHWVRQAPGQGLEWMGWINPNSGGTNYAQKFQGRVTMTRDTSTSTVYMELSSLRSEDTAVYYCARDSRIAVAASSFDYWGQGTLVTVSSTTTPAPRPPTPAPTIASQPLSLRPEACRPAAGGAVHTRGLDFACDDIQMTQSPSSLSASVGDRVTITCRASRGINNWLTWYQQKPGKAPKLLIYGASSLQSGVPSRFSGSGSGTDFTLTISSLQPEDFATYYCQQSYRIPYTFGQGTKLEIKRGGGGSGGGGSGGGGSGGGGSFWVLVVVGGVLACYSLLVTVAFIIFWVRSKRSRLLHSDYMNMTPRRPGPTRKHYQPYAPPRDFAAYRSKRGRKKLLYIFKQPFMRPVQTTQEEDGCSCRFPEEEEGGCELRVKFSRSADAPAYKQGQNQLYNELNLGRREEYDVLDKRRGRDPEMGGKPRRKNPQEGLYNELQKDKMAEAYSEIGMKGERRRGKGHDGLYQGLSTATKDTYDALHMQALPPR

SEQ ID NO: 1581 - protein, 493 aa, synthetic construct
  REGION 1..493: note = CAR Sequence
MALPVTALLLPLALLLHAARPQVQLVQSGAEVKKPGASVKVSCKASGYTFTGYYMHWVRQAPGQGLEWMGRINPNGGSTTYAQKFQGRVTMTRDTSTSTVYMELSSLRSEDTAVYYCARDDFYYYYLDFWGKGTTVTVSSTTTPAPRPPTPAPTIASQPLSLRPEACRPAAGGAVHTRGLDFACDDIQMTQSPSSLSASVGDRVTITCRASQSINDWLAWYQQKPGKAPKLLIYAASNLQSGVPSRFSGSGSGTDFTLTISSLQPEDFATYYCQQGYSTPPTFGQGTKVEIKRGGGGSGGGGSGGGGSGGGGSFWVLVVVGGVLACYSLLVTVAFIIFWVRSKRSRLLHSDYMNMTPRRPGPTRKHYQPYAPPRDFAAYRSRVKFSRSADAPAYKQGQNQLYNELNLGRREEYDVLDKRRGRDPEMGGKPRRKNPQEGLYNELQKDKMAEAYSEIGMKGERRRGKGHDGLYQGLSTATKDTYDALHMQALPPR

SEQ ID NO: 1582 - protein, 494 aa, synthetic construct
  REGION 1..494: note = CAR Sequence
MALPVTALLLPLALLLHAARPQVQLVQSGAEVKKPGASVKVSCKASGYTFTGYYMHWVRQAPGQGLEWMGRINPNGGSTTYAQKFQGRVTMTRDTSTSTVYMELSSLRSEDTAVYYCARDDFYYYYLDFWGKGTTVTVSSTTTPAPRPPTPAPTIASQPLSLRPEACRPAAGGAVHTRGLDFACDDIQMTQSPSSLSASVGDRVTITCRASQSINDWLAWYQQKPGKAPKLLIYAASNLQSGVPSRFSGSGSGTDFTLTISSLQPEDFATYYCQQGYSTPPTFGQGTKVEIKRGGGGSGGGGSGGGGSGGGGSFWVLVVVGGVLACYSLLVTVAFIIFWVKRGRKKLLYIFKQPFMRPVQTTQEEDGCSCRFPEEEEGGCELRVKFSRSADAPAYKQGQNQLYNELNLGRREEYDVLDKRRGRDPEMGGKPRRKNPQEGLYNELQKDKMAEAYSEIGMKGERRRGKGHDGLYQGLSTATKDTYDALHMQALPPR

SEQ ID NO: 1583 - protein, 535 aa, synthetic construct
  REGION 1..535: note = CAR Sequence
MALPVTALLLPLALLLHAARPQVQLVQSGAEVKKPGASVKVSCKASGYTFTGYYMHWVRQAPGQGLEWMGRINPNGGSTTYAQKFQGRVTMTRDTSTSTVYMELSSLRSEDTAVYYCARDDFYYYYLDFWGKGTTVTVSSTTTPAPRPPTPAPTIASQPLSLRPEACRPAAGGAVHTRGLDFACDDIQMTQSPSSLSASVGDRVTITCRASQSINDWLAWYQQKPGKAPKLLIYAASNLQSGVPSRFSGSGSGTDFTLTISSLQPEDFATYYCQQGYSTPPTFGQGTKVEIKRGGGGSGGGGSGGGGSGGGGSFWVLVVVGGVLACYSLLVTVAFIIFWVRSKRSRLLHSDYMNMTPRRPGPTRKHYQPYAPPRDFAAYRSKRGRKKLLYIFKQPFMRPVQTTQEEDGCSCRFPEEEEGGCELRVKFSRSADAPAYKQGQNQLYNELNLGRREEYDVLDKRRGRDPEMGGKPRRKNPQEGLYNELQKDKMAEAYSEIGMKGERRRGKGHDGLYQGLSTATKDTYDALHMQALPPR

SEQ ID NO: 1584 - protein, 494 aa, synthetic construct
  REGION 1..494: note = CAR Sequence
MALPVTALLLPLALLLHAARPQVQLVQSGAEVKKPGASVKVSCKASGYTFSNYYMHWVRQAPGQGLEWMGWMNPDSGTTGYAQKFQGRVTMTRDTSTSTVYMELSSLRSEDTAVYYCVRDGTMVQGIFDYWGQGTLVTVSSTTTPAPRPPTPAPTIASQPLSLRPEACRPAAGGAVHTRGLDFACDDIQMTQSPSSLSASVGDRVTITCRASQSISSWLAWYQQKPGKAPKLLIYGASSLQSGVPSRFSGSGSGTDFTLTISSLQPEDFATYYCQQTYRTPLTFGPGTKVDIKRGGGGSGGGGSGGGGSGGGGSFWVLVVVGGVLACYSLLVTVAFIIFWVRSKRSRLLHSDYMNMTPRRPGPTRKHYQPYAPPRDFAAYRSRVKFSRSADAPAYKQGQNQLYNELNLGRREEYDVLDKRRGRDPEMGGKPRRKNPQEGLYNELQKDKMAEAYSEIGMKGERRRGKGHDGLYQGLSTATKDTYDALHMQALPPR

SEQ ID NO: 1585 - protein, 495 aa, synthetic construct
  REGION 1..495: note = CAR Sequence
MALPVTALLLPLALLLHAARPQVQLVQSGAEVKKPGASVKVSCKASGYTFSNYYMHWVRQAPGQGLEWMGWMNPDSGTTGYAQKFQGRVTMTRDTSTSTVYMELSSLRSEDTAVYYCVRDGTMVQGIFDYWGQGTLVTVSSTTTPAPRPPTPAPTIASQPLSLRPEACRPAAGGAVHTRGLDFACDDIQMTQSPSSLSASVGDRVTITCRASQSISSWLAWYQQKPGKAPKLLIYGASSLQSGVPSRFSGSGSGTDFTLTISSLQPEDFATYYCQQTYRTPLTFGPGTKVDIKRGGGGSGGGGSGGGGSGGGGSFWVLVVVGGVLACYSLLVTVAFIIFWVKRGRKKLLYIFKQPFMRPVQTTQEEDGCSCRFPEEEEGGCELRVKFSRSADAPAYKQGQNQLYNELNLGRREEYDVLDKRRGRDPEMGGKPRRKNPQEGLYNELQKDKMAEAYSEIGMKGERRRGKGHDGLYQGLSTATKDTYDALHMQALPPR

SEQ ID NO: 1586 - protein, 536 aa, synthetic construct
  REGION 1..536: note = CAR Sequence
MALPVTALLLPLALLLHAARPQVQLVQSGAEVKKPGASVKVSCKASGYTFSNYYMHWVRQAPGQGLEWMGWMNPDSGTTGYAQKFQGRVTMTRDTSTSTVYMELSSLRSEDTAVYYCVRDGTMVQGIFDYWGQGTLVTVSSTTTPAPRPPTPAPTIASQPLSLRPEACRPAAGGAVHTRGLDFACDDIQMTQSPSSLSASVGDRVTITCRASQSISSWLAWYQQKPGKAPKLLIYGASSLQSGVPSRFSGSGSGTDFTLTISSLQPEDFATYYCQQTYRTPLTFGPGTKVDIKRGGGGSGGGGSGGGGSGGGGSFWVLVVVGGVLACYSLLVTVAFIIFWVRSKRSRLLHSDYMNMTPRRPGPTRKHYQPYAPPRDFAAYRSKRGRKKLLYIFKQPFMRPVQTTQEEDGCSCRFPEEEEGGCELRVKFSRSADAPAYKQGQNQLYNELNLGRREEYDVLDKRRGRDPEMGGKPRRKNPQEGLYNELQKDKMAEAYSEIGMKGERRRGKGHDGLYQGLSTATKDTYDALHMQALPPR

SEQ ID NO: 1587 - protein, 492 aa, synthetic construct
  REGION 1..492: note = CAR Sequence
MALPVTALLLPLALLLHAARPQVQLVQSGAEVKKPGSSVKVSCKASGGTFSTYAITWVRQAPGQGLEWMGGIIPIVGRANYAQKFQGRVTITADESTSTAYMELSSLRSEDTAVYYCARSGGHDLDYWGQGTLVTVSSTTTPAPRPPTPAPTIASQPLSLRPEACRPAAGGAVHTRGLDFACDDIQMTQSPSSLSASVGDRVTITCRASQGIGNDLGWYQQKPGKAPKLLIYGASSVQSGVPSRFSGSGSGTDFTLTISSLQPEDFATYYCQQSYSTPITFGQGTRLEIKRGGGGSGGGGSGGGGSGGGGSFWVLVVVGGVLACYSLLVTVAFIIFWVKRGRKKLLYIFKQPFMRPVQTTQEEDGCSCRFPEEEEGGCELRVKFSRSADAPAYKQGQNQLYNELNLGRREEYDVLDKRRGRDPEMGGKPRRKNPQEGLYNELQKDKMAEAYSEIGMKGERRRGKGHDGLYQGLSTATKDTYDALHMQALPPR

SEQ ID NO: 1588 - protein, 533 aa, synthetic construct
  REGION 1..533: note = CAR Sequence
MALPVTALLLPLALLLHAARPQVQLVQSGAEVKKPGSSVKVSCKASGGTFSTYAITWVRQAPGQGLEWMGGIIPIVGRANYAQKFQGRVTITADESTSTAYMELSSLRSEDTAVYYCARSGGHDLDYWGQGTLVTVSSTTTPAPRPPTPAPTIASQPLSLRPEACRPAAGGAVHTRGLDFACDDIQMTQSPSSLSASVGDRVTITCRASQGIGNDLGWYQQKPGKAPKLLIYGASSVQSGVPSRFSGSGSGTDFTLTISSLQPEDFATYYCQQSYSTPITFGQGTRLEIKRGGGGSGGGGSGGGGSGGGGSFWVLVVVGGVLACYSLLVTVAFIIFWVRSKRSRLLHSDYMNMTPRRPGPTRKHYQPYAPPRDFAAYRSKRGRKKLLYIFKQPFMRPVQTTQEEDGCSCRFPEEEEGGCELRVKFSRSADAPAYKQGQNQLYNELNLGRREEYDVLDKRRGRDPEMGGKPRRKNPQEGLYNELQKDKMAEAYSEIGMKGERRRGKGHDGLYQGLSTATKDTYDALHMQALPPR

SEQ ID NO: 1589 - protein, 491 aa, synthetic construct
  REGION 1..491: note = CAR Sequence
MALPVTALLLPLALLLHAARPQVQLVQSGAEVKKPGSSVKVSCKASGGTFSTYAITWVRQAPGQGLEWMGGIIPIVGRANYAQKFQGRVTITADESTSTAYMELSSLRSEDTAVYYCARSGGHDLDYWGQGTLVTVSSTTTPAPRPPTPAPTIASQPLSLRPEACRPAAGGAVHTRGLDFACDDIQMTQSPSSLSASVGDRVTITCRASQGIGNDLGWYQQKPGKAPKLLIYGASSVQSGVPSRFSGSGSGTDFTLTISSLQPEDFATYYCQQSYSTPITFGQGTRLEIKRGGGGSGGGGSGGGGSGGGGSFWVLVVVGGVLACYSLLVTVAFIIFWVRSKRSRLLHSDYMNMTPRRPGPTRKHYQPYAPPRDFAAYRSRVKFSRSADAPAYKQGQNQLYNELNLGRREEYDVLDKRRGRDPEMGGKPRRKNPQEGLYNELQKDKMAEAYSEIGMKGERRRGKGHDGLYQGLSTATKDTYDALHMQALPPR

SEQ ID NO: 1590 - protein, 498 aa, synthetic construct
  REGION 1..498: note = CAR Sequence
MALPVTALLLPLALLLHAARPEVQLLESGGGLVQPGGSLRLSCAASGFTFSSYGMHWVRQAPGKGLEWVSSISGSGDTTYYADSVKGRFTISRDNSKNTLYLQMNSLRAEDTAVYYCARDNPYGDYGGSFDYWGQGTLVTVSSTTTPAPRPPTPAPTIASQPLSLRPEACRPAAGGAVHTRGLDFACDEIVMTQSPATLSVSPGERATLSCRASQSVSSSYLAWYQQKPGQAPRLLIYATSTRATGIPARFSGSGSGTEFTLTISSLQSEDFAVYYCQQYGSLPLTFGQGTKVEIKRGGGGSGGGGSGGGGSGGGGSFWVLVVVGGVLACYSLLVTVAFIIFWVKRGRKKLLYIFKQPFMRPVQTTQEEDGCSCRFPEEEEGGCELRVKFSRSADAPAYKQGQNQLYNELNLGRREEYDVLDKRRGRDPEMGGKPRRKNPQEGLYNELQKDKMAEAYSEIGMKGERRRGKGHDGLYQGLSTATKDTYDALHMQALPPR

SEQ ID NO: 1591 - protein, 539 aa, synthetic construct
  REGION 1..539: note = CAR Sequence
MALPVTALLLPLALLLHAARPEVQLLESGGGLVQPGGSLRLSCAASGFTFSSYGMHWVRQAPGKGLEWVSSISGSGDTTYYADSVKGRFTISRDNSKNTLYLQMNSLRAEDTAVYYCARDNPYGDYGGSFDYWGQGTLVTVSSTTTPAPRPPTPAPTIASQPLSLRPEACRPAAGGAVHTRGLDFACDEIVMTQSPATLSVSPGERATLSCRASQSVSSSYLAWYQQKPGQAPRLLIYATSTRATGIPARFSGSGSGTEFTLTISSLQSEDFAVYYCQQYGSLPLTFGQGTKVEIKRGGGGSGGGGSGGGGSGGGGSFWVLVVVGGVLACYSLLVTVAFIIFWVRSKRSRLLHSDYMNMTPRRPGPTRKHYQPYAPPRDFAAYRSKRGRKKLLYIFKQPFMRPVQTTQEEDGCSCRFPEEEEGGCELRVKFSRSADAPAYKQGQNQLYNELNLGRREEYDVLDKRRGRDPEMGGKPRRKNPQEGLYNELQKDKMAEAYSEIGMKGERRRGKGHDGLYQGLSTATKDTYDALHMQALPPR

SEQ ID NO: 1592 - protein, 497 aa, synthetic construct
  REGION 1..497: note = CAR Sequence
MALPVTALLLPLALLLHAARPEVQLLESGGGLVQPGGSLRLSCAASGFTFSSYGMHWVRQAPGKGLEWVSSISGSGDTTYYADSVKGRFTISRDNSKNTLYLQMNSLRAEDTAVYYCARDNPYGDYGGSFDYWGQGTLVTVSSTTTPAPRPPTPAPTIASQPLSLRPEACRPAAGGAVHTRGLDFACDEIVMTQSPATLSVSPGERATLSCRASQSVSSSYLAWYQQKPGQAPRLLIYATSTRATGIPARFSGSGSGTEFTLTISSLQSEDFAVYYCQQYGSLPLTFGQGTKVEIKRGGGGSGGGGSGGGGSGGGGSFWVLVVVGGVLACYSLLVTVAFIIFWVRSKRSRLLHSDYMNMTPRRPGPTRKHYQPYAPPRDFAAYRSRVKFSRSADAPAYKQGQNQLYNELNLGRREEYDVLDKRRGRDPEMGGKPRRKNPQEGLYNELQKDKMAEAYSEIGMKGERRRGKGHDGLYQGLSTATKDTYDALHMQALPPR

SEQ ID NO: 1593 - protein, 497 aa, synthetic construct
  REGION 1..497: note = CAR Sequence
MALPVTALLLPLALLLHAARPQVQLVQSGAEVKKPGASVKVSCKASGYTFTSYYMHWVRQAPGQGLEWMGIIDPSGGSTNYAQKFQGRVTMTRDTSTSTVYMELSSLRSEDTAVYYCARDYYGSGSYYGLDYWGRGTLVTVSSTTTPAPRPPTPAPTIASQPLSLRPEACRPAAGGAVHTRGLDFACDDIQMTQSPSSLSASVGDRVTITCRASQGISNNLNWYQQKPGKAPKLLIYDASNLETGVPSRFSGSGSGTDFTLTISSLQPEDFATYYCQQANSFPLTFGPGTKVDIKRGGGGSGGGGSGGGGSGGGGSFWVLVVVGGVLACYSLLVTVAFIIFWVKRGRKKLLYIFKQPFMRPVQTTQEEDGCSCRFPEEEEGGCELRVKFSRSADAPAYKQGQNQLYNELNLGRREEYDVLDKRRGRDPEMGGKPRRKNPQEGLYNELQKDKMAEAYSEIGMKGERRRGKGHDGLYQGLSTATKDTYDALHMQALPPR

SEQ ID NO: 1594 - protein, 538 aa, synthetic construct
  REGION 1..538: note = CAR Sequence
MALPVTALLLPLALLLHAARPQVQLVQSGAEVKKPGASVKVSCKASGYTFTSYYMHWVRQAPGQGLEWMGIIDPSGGSTNYAQKFQGRVTMTRDTSTSTVYMELSSLRSEDTAVYYCARDYYGSGSYYGLDYWGRGTLVTVSSTTTPAPRPPTPAPTIASQPLSLRPEACRPAAGGAVHTRGLDFACDDIQMTQSPSSLSASVGDRVTITCRASQGISNNLNWYQQKPGKAPKLLIYDASNLETGVPSRFSGSGSGTDFTLTISSLQPEDFATYYCQQANSFPLTFGPGTKVDIKRGGGGSGGGGSGGGGSGGGGSFWVLVVVGGVLACYSLLVTVAFIIFWVRSKRSRLLHSDYMNMTPRRPGPTRKHYQPYAPPRDFAAYRSKRGRKKLLYIFKQPFMRPVQTTQEEDGCSCRFPEEEEGGCELRVKFSRSADAPAYKQGQNQLYNELNLGRREEYDVLDKRRGRDPEMGGKPRRKNPQEGLYNELQKDKMAEAYSEIGMKGERRRGKGHDGLYQGLSTATKDTYDALHMQALPPR

SEQ ID NO: 1595 - protein, 496 aa, synthetic construct
  REGION 1..496: note = CAR Sequence
MALPVTALLLPLALLLHAARPQVQLVQSGAEVKKPGASVKVSCKASGYTFTSYYMHWVRQAPGQGLEWMGIIDPSGGSTNYAQKFQGRVTMTRDTSTSTVYMELSSLRSEDTAVYYCARDYYGSGSYYGLDYWGRGTLVTVSSTTTPAPRPPTPAPTIASQPLSLRPEACRPAAGGAVHTRGLDFACDDIQMTQSPSSLSASVGDRVTITCRASQGISNNLNWYQQKPGKAPKLLIYDASNLETGVPSRFSGSGSGTDFTLTISSLQPEDFATYYCQQANSFPLTFGPGTKVDIKRGGGGSGGGGSGGGGSGGGGSFWVLVVVGGVLACYSLLVTVAFIIFWVRSKRSRLLHSDYMNMTPRRPGPTRKHYQPYAPPRDFAAYRSRVKFSRSADAPAYKQGQNQLYNELNLGRREEYDVLDKRRGRDPEMGGKPRRKNPQEGLYNELQKDKMAEAYSEIGMKGERRRGKGHDGLYQGLSTATKDTYDALHMQALPPR

SEQ ID NO: 1596 - protein, 497 aa, synthetic construct
  REGION 1..497: note = CAR Sequence
MALPVTALLLPLALLLHAARPQVQLVQSGAEVKKPGASVKVSCKASGYSFTSHAISWVRQAPGQGLEWMGWIKPNSGDTKYAQKFQGRVTMTRDTSTSTVYMELSSLRSEDTAVYYCARGSDDYYGSYYFDYWGQGTLVTVSSTTTPAPRPPTPAPTIASQPLSLRPEACRPAAGGAVHTRGLDFACDDIQMTQSPSSLSASVGDRVTITCRASQGISNYLAWYQQKPGKAPKLLIYTASTLQSGVPSRFSGSGSGTDFTLTISSLQPEDFATYYCQQSYSTPLTFGGGTKVEIKRGGGGSGGGGSGGGGSGGGGSFWVLVVVGGVLACYSLLVTVAFIIFWVKRGRKKLLYIFKQPFMRPVQTTQEEDGCSCRFPEEEEGGCELRVKFSRSADAPAYKQGQNQLYNELNLGRREEYDVLDKRRGRDPEMGGKPRRKNPQEGLYNELQKDKMAEAYSEIGMKGERRRGKGHDGLYQGLSTATKDTYDALHMQALPPR

SEQ ID NO: 1597 - protein, 538 aa, synthetic construct
  REGION 1..538: note = CAR Sequence
MALPVTALLLPLALLLHAARPQVQLVQSGAEVKKPGASVKVSCKASGYSFTSHAISWVRQAPGQGLEWMGWIKPNSGDTKYAQKFQGRVTMTRDTSTSTVYMELSSLRSEDTAVYYCARGSDDYYGSYYFDYWGQGTLVTVSSTTTPAPRPPTPAPTIASQPLSLRPEACRPAAGGAVHTRGLDFACDDIQMTQSPSSLSASVGDRVTITCRASQGISNYLAWYQQKPGKAPKLLIYTASTLQSGVPSRFSGSGSGTDFTLTISSLQPEDFATYYCQQSYSTPLTFGGGTKVEIKRGGGGSGGGGSGGGGSGGGGSFWVLVVVGGVLACYSLLVTVAFIIFWVRSKRSRLLHSDYMNMTPRRPGPTRKHYQPYAPPRDFAAYRSKRGRKKLLYIFKQPFMRPVQTTQEEDGCSCRFPEEEEGGCELRVKFSRSADAPAYKQGQNQLYNELNLGRREEYDVLDKRRGRDPEMGGKPRRKNPQEGLYNELQKDKMAEAYSEIGMKGERRRGKGHDGLYQGLSTATKDTYDALHMQALPPR

SEQ ID NO: 1598 - protein, 496 aa, synthetic construct
  REGION 1..496: note = CAR Sequence
MALPVTALLLPLALLLHAARPQVQLVQSGAEVKKPGASVKVSCKASGYSFTSHAISWVRQAPGQGLEWMGWIKPNSGDTKYAQKFQGRVTMTRDTSTSTVYMELSSLRSEDTAVYYCARGSDDYYGSYYFDYWGQGTLVTVSSTTTPAPRPPTPAPTIASQPLSLRPEACRPAAGGAVHTRGLDFACDDIQMTQSPSSLSASVGDRVTITCRASQGISNYLAWYQQKPGKAPKLLIYTASTLQSGVPSRFSGSGSGTDFTLTISSLQPEDFATYYCQQSYSTPLTFGGGTKVEIKRGGGGSGGGGSGGGGSGGGGSFWVLVVVGGVLACYSLLVTVAFIIFWVRSKRSRLLHSDYMNMTPRRPGPTRKHYQPYAPPRDFAAYRSRVKFSRSADAPAYKQGQNQLYNELNLGRREEYDVLDKRRGRDPEMGGKPRRKNPQEGLYNELQKDKMAEAYSEIGMKGERRRGKGHDGLYQGLSTATKDTYDALHMQALPPR

SEQ ID NO: 1599 - protein, 20 aa, synthetic construct
  REGION 1..20: note = hIgG1 IL2Leader
MYRMQLLSCIALSLALVTNS

SEQ ID NO: 1600 - DNA, 60 bp, synthetic construct
  misc_feature 1..60: note = hIgG1 IL2 Leader
  source 1..60: mol_type = other DNA
atgtacaggatgcaactcctgtcttgcattgcactaagtcttgcacttgtcacgaattcg

SEQ ID NO: 1601 - protein, 20 aa, synthetic construct
  REGION 1..20: note = hIgG4 IL2 Leader
MYRMQLLSCIALSLALVTNS

SEQ ID NO: 1602 - DNA, 60 bp, synthetic construct; identical to SEQ ID NO: 1600
  misc_feature 1..60: note = hIgG4 IL2 Leader
  source 1..60: mol_type = other DNA

SEQ ID NO: 1603 - protein, 97 aa, synthetic construct
  REGION 1..97: note = hIgG1 Cy1
STKGPSVFPLAPSSKSTSGGTAALGCLVKDYFPEPVTVSWNSGALTSGVHTFPAVLQSSGLYSLSSVVTVPSSSLGTQTYICNVNHKPSNTKVDKKV

SEQ ID NO: 1604 - DNA, 291 bp, synthetic construct
  misc_feature 1..291: note = hIgG1 Cy1
  source 1..291: mol_type = other DNA
tccaccaagggcccatcggtcttccccctggcaccctcctccaagagcacctctgggggcacagcggccctgggctgcctggtcaaggactacttccccgaaccggtgacggtgtcgtggaactcaggcgccctgaccagcggcgtgcacaccttcccggctgtcctacagtcctcaggactctactccctcagcagcgtggtgaccgtgccctccagcagcttgggcacccagacctacatctgcaacgtgaatcacaagcccagcaacaccaaggtggacaagaaagtt

SEQ ID NO: 1605 - protein, 97 aa, synthetic construct
  REGION 1..97: note = hIgG4 Cy1
STKGPSVFPLAPCSRSTSESTAALGCLVKDYFPEPVTVSWNSGALTSGVHTFPAVLQSSGLYSLSSVVTVPSSSLGTKTYTCNVDHKPSNTKVDKRV

SEQ ID NO: 1606 - DNA, 291 bp, synthetic construct
  misc_feature 1..291: note = hIgG4 Cy1
  source 1..291: mol_type = other DNA
tccaccaagggcccctccgtgttccccctggccccctgctcccgctccacctccgagtccaccgccgccctgggctgcctggtgaaggactacttccccgagcccgtgaccgtgtcctggaactccggcgccctgacctccggcgtgcacaccttccccgccgtgctgcagtcctccggcctgtactccctgtcctccgtggtgaccgtgccctcctcctccctgggcaccaagacctacacctgcaacgtggaccacaagccctccaacaccaaggtggacaagcgcgtg

SEQ ID NO: 1607 - protein, 15 aa, synthetic construct
  REGION 1..15: note = hIgG1 Hinge (CH)
EPKSCDKTHTCPPCP

SEQ ID NO: 1608 - DNA, 45 bp, synthetic construct
  misc_feature 1..45: note = hIgG1 Hinge (CH)
  source 1..45: mol_type = other DNA
gagcccaaatcttgtgacaaaactcacacatgcccaccgtgccca

SEQ ID NO: 1609 - protein, 11 aa, synthetic construct
  REGION 1..11: note = hIgG4 Hinge (CH)
SKYGPPCPSCP

SEQ ID NO: 1610 - DNA, 33 bp, synthetic construct
  misc_feature 1..33: note = hIgG4 Hinge (CH)
  source 1..33: mol_type = other DNA
tccaaatatggtcccccatgcccatcatgccca

SEQ ID NO: 1611 - protein, 109 aa, synthetic construct
  REGION 1..109: note = hIgG1 Cy2
PELLGGPSVFLFPPKPKDTLMISRTPEVTCVVVDVSHEDPEVKFNWYVDGVEVHNAKTKPREEQYNSTYRVVSVLTVLHQDWLNGKEYKCKVSNKALPAPIEKTISKAK

SEQ ID NO: 1612 - DNA, 327 bp, synthetic construct
  misc_feature 1..327: note = hIgG1 Cy2
  source 1..327: mol_type = other DNA
cctgaactcctggggggaccgtcagtcttcctcttccccccaaaacccaaggacaccctcatgatctcccggacccctgaggtcacatgcgtggtggtggacgtgagccacgaagaccctgaggtcaagttcaactggtacgtggacggcgtggaggtgcataatgccaagacaaagccgcgggaggagcagtacaacagcacgtaccgtgtggtcagcgtcctcaccgtcctgcaccaggactggctgaatggcaaggagtacaagtgcaaggtctccaacaaagccctcccagcccccatcgagaaaaccatctccaaagccaaa

SEQ ID NO: 1613 - protein, 109 aa, synthetic construct
  REGION 1..109: note = hIgG4 Cy2
PEFLGGPSVFLFPPKPKDTLMISRTPEVTCVVVDVSQEDPEVQFNWYVDGVEVHNAKTKPREEQFNSTYRVVSVLTVLHQDWLNGKEYKCKVSNKGLPSSIEKTISKAK

SEQ ID NO: 1614 - protein, 327 aa, synthetic construct
  REGION 1..327: note = hIgG4 Cy2
CCTGAGTTCCTGGGGGGACCATCAGTCTTCCTGTTCCCCCCAAAACCCAAGGACACTCTCATGATCTCCCGGACCCCTGAGGTCACGTGCGTGGTGGTGGACGTGAGCCAGGAAGACCCCGAGGTCCAGTTCAACTGGTACGTGGATGGCGTGGAGGTGCATAATGCCAAGACAAAGCCGCGGGAGGAGCAGTTCAACAGCACGTACCGTGTGGTCAGCGTCCTCACCGTCCTGCACCAGGACTGGCTGAACGGCAAGGAGTACAAGTGCAAGGTCTCCAACAAAGGCCTCCCGTCCTCCATCGAGAAAACCATCTCCAAAGCCAAA

SEQ ID NO: 1615 - protein, 104 aa, synthetic construct
  REGION 1..104: note = hIgG1 Cy3
QPREPQVYTLPPSREEMTKNQVSLTCLVKGFYPSDIAVEWESNGQPENNYKTTPPVLDSDGSFFLYSKLTVDKSRWQQGNVFSCSVMHEALHNHYTQKSLSLSP

SEQ ID NO: 1616 - DNA, 312 bp, synthetic construct
  misc_feature 1..312: note = hIgG1 Cy3
  source 1..312: mol_type = other DNA
cagccccgagaaccacaggtgtacaccctgcccccatcccgggaggagatgaccaagaaccaggtcagcctgacctgcctggtcaaaggcttctatcccagcgacatcgccgtggagtgggagagcaatgggcagccggagaacaactacaagaccacgcctcccgtgctggactccgacggctccttcttcctctacagcaagctcaccgtggacaagagcaggtggcagcaggggaacgtcttctcatgctccgtgatgcacgaggctctgcacaaccactacacgcagaagagcctctccctgtctccg

SEQ ID NO: 1617 - protein, 104 aa, synthetic construct
  REGION 1..104: note = hIgG4 Cy3
QPREPQVYTLPPSQEEMTKNQVSLTCLVKGFYPSDIAVEWESNGQPENNYKTTPPVLDSDGSFFLYSRLTVDKSRWQEGNVFSCSVMHEALHNHYTQKSLSLSL

SEQ ID NO: 1618 - DNA, 312 bp, synthetic construct
  misc_feature 1..312: note = hIgG4 Cy3
  source 1..312: mol_type = other DNA
cagccccgagagccacaggtgtacaccctgcccccatcccaggaggagatgaccaagaaccaggtcagcctgacctgcctggtcaaaggcttctaccccagcgacatcgccgtggagtgggagagcaatgggcagccggagaacaactacaagaccacgcctcccgtgctggactccgacggctccttcttcctctacagcaggctaaccgtggacaagagcaggtggcaggaggggaatgtcttctcatgctccgtgatgcatgaggctctgcacaaccactacacacagaagagcctctccctgtctctg

SEQ ID NO: 1619-1622 - skipped (4 entries)

SEQ ID NO: 1623 - protein, 106 aa, synthetic construct
  REGION 1..106: note = hIgG1 IgK-Ck1
TVAAPSVFIFPPSDEQLKSGTASVVCLLNNFYPREAKVQWKVDNALQSGNSQESVTEQDSKDSTYSLSSTLTLSKADYEKHKVYACEVTHQGLSSPVTKSFNRGEC

SEQ ID NO: 1624 - DNA, 321 bp, synthetic construct
  misc_feature 1..321: note = hIgG1 IgK-Ck1
  source 1..321: mol_type = other DNA
acggtggctgcaccatctgtcttcatcttcccgccatctgatgagcagttgaaatctggaactgcctctgttgtgtgcctgctgaataacttctatcccagagaggccaaagtacagtggaaggtggataacgccctccaatcgggtaactcccaggagagtgtcacagagcaggacagcaaggacagcacctacagcctcagcagcaccctgacgctgagcaaagcagactacgagaaacacaaagtctacgcctgcgaagtcacccatcagggcctgagctcgcccgtcacaaagagcttcaacaggggagagtgttag

SEQ ID NO: 1625 - protein, 106 aa, synthetic construct; identical to SEQ ID NO: 1623
  REGION 1..106: note = hIgG4 IgK-Ck1

SEQ ID NO: 1626 - DNA, 321 bp, synthetic construct; identical to SEQ ID NO: 1624
  misc_feature 1..321: note = hIgG4 IgK-Ck1
  source 1..321: mol_type = other DNA

SEQ ID NO: 1627 - protein, 444 aa, synthetic construct
  REGION 1..444: note = IgG1 Heavy Chain
QVQLVQSGAEVKKPGASVKVSCKASGYSFTGYYIHWVRQAPGQGLEWMGWINPNSGGTNYAQKFQGRVTMTRDTSTSTVYMELSSLRSEDTAVYYCARDQWDGYNSGYFDYWGQGTLVTVSSSTKGPSVFPLAPSSKSTSGGTAALGCLVKDYFPEPVTVSWNSGALTSGVHTFPAVLQSSGLYSLSSVVTVPSSSLGTQTYICNVNHKPSNTKVDKKVDKTHTCPPCPPELLGGPSVFLFPPKPKDTLMISRTPEVTCVVVDVSHEDPEVKFNWYVDGVEVHNAKTKPREEQYNSTYRVVSVLTVLHQDWLNGKEYKCKVSNKALPAPIEKTISKAKQPREPQVYTLPPSREEMTKNQVSLTCLVKGFYPSDIAVEWESNGQPENNYKTTPPVLDSDGSFFLYSKLTVDKSRWQQGNVFSCSVMHEALHNHYTQKSLSLSPGK

SEQ ID NO: 1628 - protein, 443 aa, synthetic construct
  REGION 1..443: note = IgG1 Heavy Chain
EVQLLESGGGLVQPGGSLRLSCAASGFTFSDYYMSWVRQAPGKGLEWVSGISGSGYSTYYADSVKGRFTISRDNSKNTLYLQMNSLRAEDTAVYYCARTFGRGPDWYFDLWGRGTLVTVSSSTKGPSVFPLAPSSKSTSGGTAALGCLVKDYFPEPVTVSWNSGALTSGVHTFPAVLQSSGLYSLSSVVTVPSSSLGTQTYICNVNHKPSNTKVDKKVDKTHTCPPCPPELLGGPSVFLFPPKPKDTLMISRTPEVTCVVVDVSHEDPEVKFNWYVDGVEVHNAKTKPREEQYNSTYRVVSVLTVLHQDWLNGKEYKCKVSNKALPAPIEKTISKAKQPREPQVYTLPPSREEMTKNQVSLTCLVKGFYPSDIAVEWESNGQPENNYKTTPPVLDSDGSFFLYSKLTVDKSRWQQGNVFSCSVMHEALHNHYTQKSLSLSPGK

SEQ ID NO: 1629 - protein, 444 aa, synthetic construct
  REGION 1..444: note = IgG1 Heavy Chain
EVQLLESGGGLVQPGGSLRLSCAASGFTFSNSDMNWVRQAPGKGLEWVSAISGSGGSTYYADSVKGRFTISRDNSKNTLYLQMNSLRAEDTAVYYCARGREDDYGDYVFDYWGQGTLVTVSSSTKGPSVFPLAPSSKSTSGGTAALGCLVKDYFPEPVTVSWNSGALTSGVHTFPAVLQSSGLYSLSSVVTVPSSSLGTQTYICNVNHKPSNTKVDKKVDKTHTCPPCPPELLGGPSVFLFPPKPKDTLMISRTPEVTCVVVDVSHEDPEVKFNWYVDGVEVHNAKTKPREEQYNSTYRVVSVLTVLHQDWLNGKEYKCKVSNKALPAPIEKTISKAKQPREPQVYTLPPSREEMTKNQVSLTCLVKGFYPSDIAVEWESNGQPENNYKTTPPVLDSDGSFFLYSKLTVDKSRWQQGNVFSCSVMHEALHNHYTQKSLSLSPGK

SEQ ID NO: 1630 - protein, 438 aa, synthetic construct
  REGION 1..438: note = IgG1 Heavy Chain
QVQLVQSGAEVKKPGASVKVSCKASGGTFSSYAISWVRQAPGQGLEWMGWINPNSGNTGYAQKFQGRVTMTRDTSTSTVYMELSSLRSEDTAVYYCAREHGDMDVWGQGTTVTVSSSTKGPSVFPLAPSSKSTSGGTAALGCLVKDYFPEPVTVSWNSGALTSGVHTFPAVLQSSGLYSLSSVVTVPSSSLGTQTYICNVNHKPSNTKVDKKVDKTHTCPPCPPELLGGPSVFLFPPKPKDTLMISRTPEVTCVVVDVSHEDPEVKFNWYVDGVEVHNAKTKPREEQYNSTYRVVSVLTVLHQDWLNGKEYKCKVSNKALPAPIEKTISKAKQPREPQVYTLPPSREEMTKNQVSLTCLVKGFYPSDIAVEWESNGQPENNYKTTPPVLDSDGSFFLYSKLTVDKSRWQQGNVFSCSVMHEALHNHYTQKSLSLSPGK

SEQ ID NO: 1631 - protein, 444 aa, synthetic construct
  REGION 1..444: note = IgG1 Heavy Chain
QVQLVQSGAEVKKPGASVKVSCKASGNTFTSYGISWVRQAPGQGLEWMGWINPNSGGTKYAQKFQGRVTMTRDTSTSTVYMELSSLRSEDTAVYYCARESWFGELYYGMDVWGKGTTVTVSSSTKGPSVFPLAPSSKSTSGGTAALGCLVKDYFPEPVTVSWNSGALTSGVHTFPAVLQSSGLYSLSSVVTVPSSSLGTQTYICNVNHKPSNTKVDKKVDKTHTCPPCPPELLGGPSVFLFPPKPKDTLMISRTPEVTCVVVDVSHEDPEVKFNWYVDGVEVHNAKTKPREEQYNSTYRVVSVLTVLHQDWLNGKEYKCKVSNKALPAPIEKTISKAKQPREPQVYTLPPSREEMTKNQVSLTCLVKGFYPSDIAVEWESNGQPENNYKTTPPVLDSDGSFFLYSKLTVDKSRWQQGNVFSCSVMHEALHNHYTQKSLSLSPGK

SEQ ID NO: 1632 - protein, 439 aa, synthetic construct
  REGION 1..439: note = IgG1 Heavy Chain
QVQLVQSGAEVKKPGASVKVSCKASGYTFTAYYTHWVRQAPGQGLEWMGWMNPNSGHTSYAQKFQGRVTMTRDTSTSTVYMELSSLRSEDTAVYYCAREAYDSFDYWGQGTLVTVSSSTKGPSVFPLAPSSKSTSGGTAALGCLVKDYFPEPVTVSWNSGALTSGVHTFPAVLQSSGLYSLSSVVTVPSSSLGTQTYICNVNHKPSNTKVDKKVDKTHTCPPCPPELLGGPSVFLFPPKPKDTLMISRTPEVTCVVVDVSHEDPEVKFNWYVDGVEVHNAKTKPREEQYNSTYRVVSVLTVLHQDWLNGKEYKCKVSNKALPAPIEKTISKAKQPREPQVYTLPPSREEMTKNQVSLTCLVKGFYPSDIAVEWESNGQPENNYKTTPPVLDSDGSFFLYSKLTVDKSRWQQGNVFSCSVMHEALHNHYTQKSLSLSPGK

SEQ ID NO: 1633 - protein, 444 aa, synthetic construct
  REGION 1..444: note = IgG1 Heavy Chain
QVQLVQSGAEVKKPGASVKVSCKASGYTFTDYYMHWVRQAPGQGLEWMGWINPNSGGTNYAQKFQGRVTMTRDTSTSTVYMELSSLRSEDTAVYYCARDSRIAVAASSFDYWGQGTLVTVSSSTKGPSVFPLAPSSKSTSGGTAALGCLVKDYFPEPVTVSWNSGALTSGVHTFPAVLQSSGLYSLSSVVTVPSSSLGTQTYICNVNHKPSNTKVDKKVDKTHTCPPCPPELLGGPSVFLFPPKPKDTLMISRTPEVTCVVVDVSHEDPEVKFNWYVDGVEVHNAKTKPREEQYNSTYRVVSVLTVLHQDWLNGKEYKCKVSNKALPAPIEKTISKAKQPREPQVYTLPPSREEMTKNQVSLTCLVKGFYPSDIAVEWESNGQPENNYKTTPPVLDSDGSFFLYSKLTVDKSRWQQGNVFSCSVMHEALHNHYTQKSLSLSPGK

SEQ ID NO: 1634 - protein, 440 aa, synthetic construct
  REGION 1..440: note = IgG1 Heavy Chain
EVQLLESGGGLVQPGGSLRLSCAASGFTFSSYAMSWVRQAPGKGLEWVSDISGSGSGTYYADAVKGRFTISRDNSKNTLYLQMNSLRAEDTAVYYCARPGSDGEFDYWGQGTLVTVSSSTKGPSVFPLAPSSKSTSGGTAALGCLVKDYFPEPVTVSWNSGALTSGVHTFPAVLQSSGLYSLSSVVTVPSSSLGTQTYICNVNHKPSNTKVDKKVDKTHTCPPCPPELLGGPSVFLFPPKPKDTLMISRTPEVTCVVVDVSHEDPEVKFNWYVDGVEVHNAKTKPREEQYNSTYRVVSVLTVLHQDWLNGKEYKCKVSNKALPAPIEKTISKAKQPREPQVYTLPPSREEMTKNQVSLTCLVKGFYPSDIAVEWESNGQPENNYKTTPPVLDSDGSFFLYSKLTVDKSRWQQGNVFSCSVMHEALHNHYTQKSLSLSPGK

SEQ ID NO: 1635 - protein, 442 aa, synthetic construct
  REGION 1..442: note = IgG1 Heavy Chain
QVQLVQSGAEVKKPGSSVKVSCKASGGTFSSDAINWVRQAPGQGLEWMGGFDPEDGETIYAQKFQGRVTITADESTSTAYMELSSLRSEDTAVYYCARGPSGYDFEFDYWGQGTLVTVSSSTKGPSVFPLAPSSKSTSGGTAALGCLVKDYFPEPVTVSWNSGALTSGVHTFPAVLQSSGLYSLSSVVTVPSSSLGTQTYICNVNHKPSNTKVDKKVDKTHTCPPCPPELLGGPSVFLFPPKPKDTLMISRTPEVTCVVVDVSHEDPEVKFNWYVDGVEVHNAKTKPREEQYNSTYRVVSVLTVLHQDWLNGKEYKCKVSNKALPAPIEKTISKAKQPREPQVYTLPPSREEMTKNQVSLTCLVKGFYPSDIAVEWESNGQPENNYKTTPPVLDSDGSFFLYSKLTVDKSRWQQGNVFSCSVMHEALHNHYTQKSLSLSPGK

SEQ ID NO: 1636 - protein, 443 aa, synthetic construct
  REGION 1..443: note = IgG1 Heavy Chain
QVQLVQSGAEVKKPGASVKVSCKASGDTFTTYAISWVRQAPGQGLEWMGWINPNSGVATYANKFQGRVTMTRDTSTSTVYMELSSLRSEDTAVYYCAREGIVGATDAFDIWGQGTMVTVSSSTKGPSVFPLAPSSKSTSGGTAALGCLVKDYFPEPVTVSWNSGALTSGVHTFPAVLQSSGLYSLSSVVTVPSSSLGTQTYICNVNHKPSNTKVDKKVDKTHTCPPCPPELLGGPSVFLFPPKPKDTLMISRTPEVTCVVVDVSHEDPEVKFNWYVDGVEVHNAKTKPREEQYNSTYRVVSVLTVLHQDWLNGKEYKCKVSNKALPAPIEKTISKAKQPREPQVYTLPPSREEMTKNQVSLTCLVKGFYPSDIAVEWESNGQPENNYKTTPPVLDSDGSFFLYSKLTVDKSRWQQGNVFSCSVMHEALHNHYTQKSLSLSPGK

SEQ ID NO: 1637 - protein, 444 aa, synthetic construct
  REGION 1..444: note = IgG1 Heavy Chain
QVQLVQSGAEVKKPGASVKVSCKASGDTFTNHYMHWVRQAPGQGLEWMGWINPNSGGTNYAQKFQGRVTMTRDTSTSTVYMELSSLRSEDTAVYYCARDLVPAAVGGYFDYWGQGTLVTVSSSTKGPSVFPLAPSSKSTSGGTAALGCLVKDYFPEPVTVSWNSGALTSGVHTFPAVLQSSGLYSLSSVVTVPSSSLGTQTYICNVNHKPSNTKVDKKVDKTHTCPPCPPELLGGPSVFLFPPKPKDTLMISRTPEVTCVVVDVSHEDPEVKFNWYVDGVEVHNAKTKPREEQYNSTYRVVSVLTVLHQDWLNGKEYKCKVSNKALPAPIEKTISKAKQPREPQVYTLPPSREEMTKNQVSLTCLVKGFYPSDIAVEWESNGQPENNYKTTPPVLDSDGSFFLYSKLTVDKSRWQQGNVFSCSVMHEALHNHYTQKSLSLSPGK

SEQ ID NO: 1638 - protein, 440 aa, synthetic construct
  REGION 1..440: note = IgG1 Heavy Chain
EVQLLESGGGLVQPGGSLRLSCAASGFTFSSHWMSWVRQAPGKGLEWVSAISGSGGSTYYADSVKGRFTISRDNSKNTLYLQMNSLRAEDTAVYYCARDDNSGSQADWGQGTLVTVSSSTKGPSVFPLAPSSKSTSGGTAALGCLVKDYFPEPVTVSWNSGALTSGVHTFPAVLQSSGLYSLSSVVTVPSSSLGTQTYICNVNHKPSNTKVDKKVDKTHTCPPCPPELLGGPSVFLFPPKPKDTLMISRTPEVTCVVVDVSHEDPEVKFNWYVDGVEVHNAKTKPREEQYNSTYRVVSVLTVLHQDWLNGKEYKCKVSNKALPAPIEKTISKAKQPREPQVYTLPPSREEMTKNQVSLTCLVKGFYPSDIAVEWESNGQPENNYKTTPPVLDSDGSFFLYSKLTVDKSRWQQGNVFSCSVMHEALHNHYTQKSLSLSPGK

SEQ ID NO: 1639 - protein, 444 aa, synthetic construct
  REGION 1..444: note = IgG1 Heavy Chain
QVQLVQSGAEVKKPGASVKVSCKASGYSFTGYYMHWVRQAPGQGLEWMGWINPNSGGTYFAQNFQGRVTMTRDTSTSTVYMELSSLRSEDTAVYYCVKDRGDRVVTSYLDYWGQGTLVTVSSSTKGPSVFPLAPSSKSTSGGTAALGCLVKDYFPEPVTVSWNSGALTSGVHTFPAVLQSSGLYSLSSVVTVPSSSLGTQTYICNVNHKPSNTKVDKKVDKTHTCPPCPPELLGGPSVFLFPPKPKDTLMISRTPEVTCVVVDVSHEDPEVKFNWYVDGVEVHNAKTKPREEQYNSTYRVVSVLTVLHQDWLNGKEYKCKVSNKALPAPIEKTISKAKQPREPQVYTLPPSREEMTKNQVSLTCLVKGFYPSDIAVEWESNGQPENNYKTTPPVLDSDGSFFLYSKLTVDKSRWQQGNVFSCSVMHEALHNHYTQKSLSLSPGK

SEQ ID NO: 1640 - protein, 451 aa, synthetic construct
  REGION 1..451: note = IgG1 Heavy Chain
QVQLVQSGAEVKKPGASVKVSCKASGYTFTGYYMHWVRQAPGQGLEWMGIINPSGGSTSYAQKFQGRVTMTRDTSTSTVYMELSSLRSEDTAVYYCARAAPYYYDSSGYYSGGYYFDYWGQGTLVTVSSSTKGPSVFPLAPSSKSTSGGTAALGCLVKDYFPEPVTVSWNSGALTSGVHTFPAVLQSSGLYSLSSVVTVPSSSLGTQTYICNVNHKPSNTKVDKKVDKTHTCPPCPPELLGGPSVFLFPPKPKDTLMISRTPEVTCVVVDVSHEDPEVKFNWYVDGVEVHNAKTKPREEQYNSTYRVVSVLTVLHQDWLNGKEYKCKVSNKALPAPIEKTISKAKQPREPQVYTLPPSREEMTKNQVSLTCLVKGFYPSDIAVEWESNGQPENNYKTTPPVLDSDGSFFLYSKLTVDKSRWQQGNVFSCSVMHEALHNHYTQKSLSLSPGK

SEQ ID NO: 1641 - protein, 449 aa, synthetic construct
  REGION 1..449: note = IgG1 Heavy Chain
EVQLLESGGGLVQPGGSLRLSCAASGFTFSIYEIHWVRQAPGKGLEWVSAISGSGGSTYYADSVKGRFTISRDNSKNTLYLQMNSLRAEDTAVYYCARSYCGGDCWDYYYYYGMDVWGQGTTVTVSSSTKGPSVFPLAPSSKSTSGGTAALGCLVKDYFPEPVTVSWNSGALTSGVHTFPAVLQSSGLYSLSSVVTVPSSSLGTQTYICNVNHKPSNTKVDKKVDKTHTCPPCPPELLGGPSVFLFPPKPKDTLMISRTPEVTCVVVDVSHEDPEVKFNWYVDGVEVHNAKTKPREEQYNSTYRVVSVLTVLHQDWLNGKEYKCKVSNKALPAPIEKTISKAKQPREPQVYTLPPSREEMTKNQVSLTCLVKGFYPSDIAVEWESNGQPENNYKTTPPVLDSDGSFFLYSKLTVDKSRWQQGNVFSCSVMHEALHNHYTQKSLSLSPGK

SEQ ID NO: 1642 - protein, 443 aa, synthetic construct
  REGION 1..443: note = IgG1 Heavy Chain
EVQLVESGGGLVKPGGSLRLSCAASGFTFSDNSMNWVRQAPGKGLEWVSYISSSGSTIYYADSVKGRFTISRDDSKNTLYLQMNSLKTEDTAVYYCARGRASSWPNWFDPWGQGTLVTVSSSTKGPSVFPLAPSSKSTSGGTAALGCLVKDYFPEPVTVSWNSGALTSGVHTFPAVLQSSGLYSLSSVVTVPSSSLGTQTYICNVNHKPSNTKVDKKVDKTHTCPPCPPELLGGPSVFLFPPKPKDTLMISRTPEVTCVVVDVSHEDPEVKFNWYVDGVEVHNAKTKPREEQYNSTYRVVSVLTVLHQDWLNGKEYKCKVSNKALPAPIEKTISKAKQPREPQVYTLPPSREEMTKNQVSLTCLVKGFYPSDIAVEWESNGQPENNYKTTPPVLDSDGSFFLYSKLTVDKSRWQQGNVFSCSVMHEALHNHYTQKSLSLSPGK

SEQ ID NO: 1643 - protein, 438 aa, synthetic construct
  REGION 1..438: note = IgG1 Heavy Chain
EVQLLESGGGLVQPGGSLRLSCAASGFTFSSYAMSWVRQAPGKGLEWVSGISYDSDKIGYADAVKGRFTISRDNSKNTLYLQMNSLRAEDTAVYYCAREWEGFDYWGQGTLVTVSSSTKGPSVFPLAPSSKSTSGGTAALGCLVKDYFPEPVTVSWNSGALTSGVHTFPAVLQSSGLYSLSSVVTVPSSSLGTQTYICNVNHKPSNTKVDKKVDKTHTCPPCPPELLGGPSVFLFPPKPKDTLMISRTPEVTCVVVDVSHEDPEVKFNWYVDGVEVHNAKTKPREEQYNSTYRVVSVLTVLHQDWLNGKEYKCKVSNKALPAPIEKTISKAKQPREPQVYTLPPSREEMTKNQVSLTCLVKGFYPSDIAVEWESNGQPENNYKTTPPVLDSDGSFFLYSKLTVDKSRWQQGNVFSCSVMHEALHNHYTQKSLSLSPGK

SEQ ID NO: 1644 - protein, 447 aa, synthetic construct
  REGION 1..447: note = IgG1 Heavy Chain
QVQLVQSGAEVKKPGASVKVSCKASGYTFTDHYMHWVRQAPGQGLEWMGWINPNSGGTNYAQKFQGRVTMTRDTSTSTVYMELSSLRSEDTAVYYCAKDKFGDEGSGWYGDFQHWGQGTLVTVSSSTKGPSVFPLAPSSKSTSGGTAALGCLVKDYFPEPVTVSWNSGALTSGVHTFPAVLQSSGLYSLSSVVTVPSSSLGTQTYICNVNHKPSNTKVDKKVDKTHTCPPCPPELLGGPSVFLFPPKPKDTLMISRTPEVTCVVVDVSHEDPEVKFNWYVDGVEVHNAKTKPREEQYNSTYRVVSVLTVLHQDWLNGKEYKCKVSNKALPAPIEKTISKAKQPREPQVYTLPPSREEMTKNQVSLTCLVKGFYPSDIAVEWESNGQPENNYKTTPPVLDSDGSFFLYSKLTVDKSRWQQGNVFSCSVMHEALHNHYTQKSLSLSPGK

SEQ ID NO: 1645 - protein, 437 aa, synthetic construct
  REGION 1..437: note = IgG1 Heavy Chain
EVQLLESGGGLVQPGGSLRLSCAASGFTFSSYWMHWVRQAPGKGLEWVSGFSGSARTYYADSVKGRFTISRDNSKNTLYLQMNSLRAEDTAVYYCAREWSGFDYWGQGTLVTVSSSTKGPSVFPLAPSSKSTSGGTAALGCLVKDYFPEPVTVSWNSGALTSGVHTFPAVLQSSGLYSLSSVVTVPSSSLGTQTYICNVNHKPSNTKVDKKVDKTHTCPPCPPELLGGPSVFLFPPKPKDTLMISRTPEVTCVVVDVSHEDPEVKFNWYVDGVEVHNAKTKPREEQYNSTYRVVSVLTVLHQDWLNGKEYKCKVSNKALPAPIEKTISKAKQPREPQVYTLPPSREEMTKNQVSLTCLVKGFYPSDIAVEWESNGQPENNYKTTPPVLDSDGSFFLYSKLTVDKSRWQQGNVFSCSVMHEALHNHYTQKSLSLSPGK

SEQ ID NO: 1646 - protein, 444 aa, synthetic construct
  REGION 1..444: note = IgG1 Heavy Chain
QVQLVQSGAEVKKPGASVKVSCKASGYMFTGYYIHWVRQAPGQGLEWMGWINPNSGGTNYAQKFQGRVTMTRDTSTSTVYMELSSLRSEDTAVYYCAKDRFGSGNYGYMDVWGKGTTVTVSSSTKGPSVFPLAPSSKSTSGGTAALGCLVKDYFPEPVTVSWNSGALTSGVHTFPAVLQSSGLYSLSSVVTVPSSSLGTQTYICNVNHKPSNTKVDKKVDKTHTCPPCPPELLGGPSVFLFPPKPKDTLMISRTPEVTCVVVDVSHEDPEVKFNWYVDGVEVHNAKTKPREEQYNSTYRVVSVLTVLHQDWLNGKEYKCKVSNKALPAPIEKTISKAKQPREPQVYTLPPSREEMTKNQVSLTCLVKGFYPSDIAVEWESNGQPENNYKTTPPVLDSDGSFFLYSKLTVDKSRWQQGNVFSCSVMHEALHNHYTQKSLSLSPGK

SEQ ID NO: 1647 - protein, 445 aa, synthetic construct
  REGION 1..445: note = IgG1 Heavy Chain
EVQLLESGGGLVQPGGSLRLSCAASGFTFSSYAMSWVRQAPGKGLEWVSAISGSGGSTYYADSVKGRFTISRDNSKNTLYLQMNSLRAEDTAVYYCARELSHDYGGNSDFDYWGQGTLVTVSSSTKGPSVFPLAPSSKSTSGGTAALGCLVKDYFPEPVTVSWNSGALTSGVHTFPAVLQSSGLYSLSSVVTVPSSSLGTQTYICNVNHKPSNTKVDKKVDKTHTCPPCPPELLGGPSVFLFPPKPKDTLMISRTPEVTCVVVDVSHEDPEVKFNWYVDGVEVHNAKTKPREEQYNSTYRVVSVLTVLHQDWLNGKEYKCKVSNKALPAPIEKTISKAKQPREPQVYTLPPSREEMTKNQVSLTCLVKGFYPSDIAVEWESNGQPENNYKTTPPVLDSDGSFFLYSKLTVDKSRWQQGNVFSCSVMHEALHNHYTQKSLSLSPGK

SEQ ID NO: 1648 - protein, 444 aa, synthetic construct
  REGION 1..444: note = IgG1 Heavy Chain
QVQLVQSGAEVKKPGASVKVSCKASGYTFTDYYIHWVRQAPGQGLEWMGWINPNSGGTNYAQEFQGRVTMTRDTSTSTVYMELSSLRSEDTAVYYCARDHRIAVAGSYFDYWGQGTLVTVSSSTKGPSVFPLAPSSKSTSGGTAALGCLVKDYFPEPVTVSWNSGALTSGVHTFPAVLQSSGLYSLSSVVTVPSSSLGTQTYICNVNHKPSNTKVDKKVDKTHTCPPCPPELLGGPSVFLFPPKPKDTLMISRTPEVTCVVVDVSHEDPEVKFNWYVDGVEVHNAKTKPREEQYNSTYRVVSVLTVLHQDWLNGKEYKCKVSNKALPAPIEKTISKAKQPREPQVYTLPPSREEMTKNQVSLTCLVKGFYPSDIAVEWESNGQPENNYKTTPPVLDSDGSFFLYSKLTVDKSRWQQGNVFSCSVMHEALHNHYTQKSLSLSPGK

SEQ ID NO: 1649 - protein, 446 aa, synthetic construct
  REGION 1..446: note = IgG1 Heavy Chain
QVQLVQSGAEVKKPGASVKVSCKASGYPFTAHYIHWVRQAPGQGLEWMGWINPNSGGTNYAQKFQGRVTMTRDTSTSTVYMELSSLRSEDTAVYYCARDVEMATIGAYWYFDLWGRGTLVTVSSSTKGPSVFPLAPSSKSTSGGTAALGCLVKDYFPEPVTVSWNSGALTSGVHTFPAVLQSSGLYSLSSVVTVPSSSLGTQTYICNVNHKPSNTKVDKKVDKTHTCPPCPPELLGGPSVFLFPPKPKDTLMISRTPEVTCVVVDVSHEDPEVKFNWYVDGVEVHNAKTKPREEQYNSTYRVVSVLTVLHQDWLNGKEYKCKVSNKALPAPIEKTISKAKQPREPQVYTLPPSREEMTKNQVSLTCLVKGFYPSDIAVEWESNGQPENNYKTTPPVLDSDGSFFLYSKLTVDKSRWQQGNVFSCSVMHEALHNHYTQKSLSLSPGK

SEQ ID NO: 1650 - protein, 441 aa, synthetic construct
  REGION 1..441: note = IgG1 Heavy Chain
QVQLVQSGAEVKKPGSSVKVSCKASGYSFTSYGISWVRQAPGQGLEWLGWISAYNGNTNYGQSLQGRVTITADESTSTAYMELSSLRSEDTAVYYCARARGAGTFFDYWGQGTLVTVSSSTKGPSVFPLAPSSKSTSGGTAALGCLVKDYFPEPVTVSWNSGALTSGVHTFPAVLQSSGLYSLSSVVTVPSSSLGTQTYICNVNHKPSNTKVDKKVDKTHTCPPCPPELLGGPSVFLFPPKPKDTLMISRTPEVTCVVVDVSHEDPEVKFNWYVDGVEVHNAKTKPREEQYNSTYRVVSVLTVLHQDWLNGKEYKCKVSNKALPAPIEKTISKAKQPREPQVYTLPPSREEMTKNQVSLTCLVKGFYPSDIAVEWESNGQPENNYKTTPPVLDSDGSFFLYSKLTVDKSRWQQGNVFSCSVMHEALHNHYTQKSLSLSPGK

SEQ ID NO: 1651 - protein, 441 aa, synthetic construct
  REGION 1..441: note = IgG1 Heavy Chain
QVQLVQSGAEVKKPGASVKVSCKASGYTFTGYYMHWVRQAPGQGLEWMGRINPNGGSTTYAQKFQGRVTMTRDTSTSTVYMELSSLRSEDTAVYYCARDDFYYYYLDFWGKGTTVTVSSSTKGPSVFPLAPSSKSTSGGTAALGCLVKDYFPEPVTVSWNSGALTSGVHTFPAVLQSSGLYSLSSVVTVPSSSLGTQTYICNVNHKPSNTKVDKKVDKTHTCPPCPPELLGGPSVFLFPPKPKDTLMISRTPEVTCVVVDVSHEDPEVKFNWYVDGVEVHNAKTKPREEQYNSTYRVVSVLTVLHQDWLNGKEYKCKVSNKALPAPIEKTISKAKQPREPQVYTLPPSREEMTKNQVSLTCLVKGFYPSDIAVEWESNGQPENNYKTTPPVLDSDGSFFLYSKLTVDKSRWQQGNVFSCSVMHEALHNHYTQKSLSLSPGK

SEQ ID NO: 1652 - protein, 443 aa, synthetic construct
  REGION 1..443: note = IgG1 Heavy Chain
QVQLVQSGAEVKKPGASVKVSCKASGYTFTENEMHWVRQAPGQGLEWMGWMNPNSGNTGYAQKFQGRVTMTRDTSTSTVYMELSSLRSEDTAVYYCAREGGDWPYYYMDVWGKGTTVTVSSSTKGPSVFPLAPSSKSTSGGTAALGCLVKDYFPEPVTVSWNSGALTSGVHTFPAVLQSSGLYSLSSVVTVPSSSLGTQTYICNVNHKPSNTKVDKKVDKTHTCPPCPPELLGGPSVFLFPPKPKDTLMISRTPEVTCVVVDVSHEDPEVKFNWYVDGVEVHNAKTKPREEQYNSTYRVVSVLTVLHQDWLNGKEYKCKVSNKALPAPIEKTISKAKQPREPQVYTLPPSREEMTKNQVSLTCLVKGFYPSDIAVEWESNGQPENNYKTTPPVLDSDGSFFLYSKLTVDKSRWQQGNVFSCSVMHEALHNHYTQKSLSLSPGK

SEQ ID NO: 1653 - protein, 447 aa, synthetic construct
  REGION 1..447: note = IgG1 Heavy Chain
QVQLVQSGAEVKKPGASVKVSCKASGYTLTGYYMHWVRQAPGQGLEWMGWMNPSSGNTGYAQQFQGRVTMTRDTSTSTVYMELSSLRSEDTAVYYCARASSDRYYYDGVWYFDLWGRGTLVTVSSSTKGPSVFPLAPSSKSTSGGTAALGCLVKDYFPEPVTVSWNSGALTSGVHTFPAVLQSSGLYSLSSVVTVPSSSLGTQTYICNVNHKPSNTKVDKKVDKTHTCPPCPPELLGGPSVFLFPPKPKDTLMISRTPEVTCVVVDVSHEDPEVKFNWYVDGVEVHNAKTKPREEQYNSTYRVVSVLTVLHQDWLNGKEYKCKVSNKALPAPIEKTISKAKQPREPQVYTLPPSREEMTKNQVSLTCLVKGFYPSDIAVEWESNGQPENNYKTTPPVLDSDGSFFLYSKLTVDKSRWQQGNVFSCSVMHEALHNHYTQKSLSLSPGK

SEQ ID NO: 1654 - protein, 441 aa, synthetic construct
  REGION 1..441: note = IgG1 Heavy Chain
EVQLLESGGGLVQPGGSLRLSCAASGFTFSTYAMHWVRQAPGKGLEWVSAISGSGGSTYYADSVKGRFTISRDNSKNTLYLQMNSLRAEDTAVYYCARDGYGDYPFDYWGQGTLVTVSSSTKGPSVFPLAPSSKSTSGGTAALGCLVKDYFPEPVTVSWNSGALTSGVHTFPAVLQSSGLYSLSSVVTVPSSSLGTQTYICNVNHKPSNTKVDKKVDKTHTCPPCPPELLGGPSVFLFPPKPKDTLMISRTPEVTCVVVDVSHEDPEVKFNWYVDGVEVHNAKTKPREEQYNSTYRVVSVLTVLHQDWLNGKEYKCKVSNKALPAPIEKTISKAKQPREPQVYTLPPSREEMTKNQVSLTCLVKGFYPSDIAVEWESNGQPENNYKTTPPVLDSDGSFFLYSKLTVDKSRWQQGNVFSCSVMHEALHNHYTQKSLSLSPGK

SEQ ID NO: 1655 - protein, 439 aa, synthetic construct
  REGION 1..439: note = IgG1 Heavy Chain
QVQLVQSGAEVKKPGASVKVSCKASGYTFTGYYLHWVRQAPGQGLEWMGVINVRRGSTRYAQNFQGRVTMTRDTSTSTVYMELSSLRSEDTAVYYCARVSGSYYQPWGQGTLVTVSSSTKGPSVFPLAPSSKSTSGGTAALGCLVKDYFPEPVTVSWNSGALTSGVHTFPAVLQSSGLYSLSSVVTVPSSSLGTQTYICNVNHKPSNTKVDKKVDKTHTCPPCPPELLGGPSVFLFPPKPKDTLMISRTPEVTCVVVDVSHEDPEVKFNWYVDGVEVHNAKTKPREEQYNSTYRVVSVLTVLHQDWLNGKEYKCKVSNKALPAPIEKTISKAKQPREPQVYTLPPSREEMTKNQVSLTCLVKGFYPSDIAVEWESNGQPENNYKTTPPVLDSDGSFFLYSKLTVDKSRWQQGNVFSCSVMHEALHNHYTQKSLSLSPGK

SEQ ID NO: 1656 - protein, 442 aa, synthetic construct
  REGION 1..442: note = IgG1 Heavy Chain
QVQLVQSGAEVKKPGASVKVSCKASGYTFSNYYMHWVRQAPGQGLEWMGWMNPDSGTTGYAQKFQGRVTMTRDTSTSTVYMELSSLRSEDTAVYYCVRDGTMVQGIFDYWGQGTLVTVSSSTKGPSVFPLAPSSKSTSGGTAALGCLVKDYFPEPVTVSWNSGALTSGVHTFPAVLQSSGLYSLSSVVTVPSSSLGTQTYICNVNHKPSNTKVDKKVDKTHTCPPCPPELLGGPSVFLFPPKPKDTLMISRTPEVTCVVVDVSHEDPEVKFNWYVDGVEVHNAKTKPREEQYNSTYRVVSVLTVLHQDWLNGKEYKCKVSNKALPAPIEKTISKAKQPREPQVYTLPPSREEMTKNQVSLTCLVKGFYPSDIAVEWESNGQPENNYKTTPPVLDSDGSFFLYSKLTVDKSRWQQGNVFSCSVMHEALHNHYTQKSLSLSPGK

SEQ ID NO: 1657 - protein, 439 aa, synthetic construct
  REGION 1..439: note = IgG1 Heavy Chain
QVQLVQSGAEVKKPGSSVKVSCKASGGTFSTYAITWVRQAPGQGLEWMGGIIPIVGRANYAQKFQGRVTITADESTSTAYMELSSLRSEDTAVYYCARSGGHDLDYWGQGTLVTVSSSTKGPSVFPLAPSSKSTSGGTAALGCLVKDYFPEPVTVSWNSGALTSGVHTFPAVLQSSGLYSLSSVVTVPSSSLGTQTYICNVNHKPSNTKVDKKVDKTHTCPPCPPELLGGPSVFLFPPKPKDTLMISRTPEVTCVVVDVSHEDPEVKFNWYVDGVEVHNAKTKPREEQYNSTYRVVSVLTVLHQDWLNGKEYKCKVSNKALPAPIEKTISKAKQPREPQVYTLPPSREEMTKNQVSLTCLVKGFYPSDIAVEWESNGQPENNYKTTPPVLDSDGSFFLYSKLTVDKSRWQQGNVFSCSVMHEALHNHYTQKSLSLSPGK

SEQ ID NO: 1658 - protein, 444 aa, synthetic construct
  REGION 1..444: note = IgG1 Heavy Chain
EVQLLESGGGLVQPGGSLRLSCAASGFTFSSYGMHWVRQAPGKGLEWVSSISGSGDTTYYADSVKGRFTISRDNSKNTLYLQMNSLRAEDTAVYYCARDNPYGDYGGSFDYWGQGTLVTVSSSTKGPSVFPLAPSSKSTSGGTAALGCLVKDYFPEPVTVSWNSGALTSGVHTFPAVLQSSGLYSLSSVVTVPSSSLGTQTYICNVNHKPSNTKVDKKVDKTHTCPPCPPELLGGPSVFLFPPKPKDTLMISRTPEVTCVVVDVSHEDPEVKFNWYVDGVEVHNAKTKPREEQYNSTYRVVSVLTVLHQDWLNGKEYKCKVSNKALPAPIEKTISKAKQPREPQVYTLPPSREEMTKNQVSLTCLVKGFYPSDIAVEWESNGQPENNYKTTPPVLDSDGSFFLYSKLTVDKSRWQQGNVFSCSVMHEALHNHYTQKSLSLSPGK

SEQ ID NO: 1659 - protein, 444 aa, synthetic construct
  REGION 1..444: note = IgG1 Heavy Chain
QVQLVQSGAEVKKPGASVKVSCKASGYTFTSYYMHWVRQAPGQGLEWMGIIDPSGGSTNYAQKFQGRVTMTRDTSTSTVYMELSSLRSEDTAVYYCARDYYGSGSYYGLDYWGRGTLVTVSSSTKGPSVFPLAPSSKSTSGGTAALGCLVKDYFPEPVTVSWNSGALTSGVHTFPAVLQSSGLYSLSSVVTVPSSSLGTQTYICNVNHKPSNTKVDKKVDKTHTCPPCPPELLGGPSVFLFPPKPKDTLMISRTPEVTCVVVDVSHEDPEVKFNWYVDGVEVHNAKTKPREEQYNSTYRVVSVLTVLHQDWLNGKEYKCKVSNKALPAPIEKTISKAKQPREPQVYTLPPSREEMTKNQVSLTCLVKGFYPSDIAVEWESNGQPENNYKTTPPVLDSDGSFFLYSKLTVDKSRWQQGNVFSCSVMHEALHNHYTQKSLSLSPGK

SEQ ID NO: 1660 - protein, 442 aa, synthetic construct
  REGION 1..442: note = IgG1 Heavy Chain
QVQLVQSGAEVKKPGASVKVSCKASGYTFTDYYMHWVRQAPGQGLEWMGIINPSGGSTRYAQKFQGRVTMTRDTSTSTVYMELSSLRSEDTAVYYCARVDGRRWLQSDYWGQGTLVTVSSSTKGPSVFPLAPSSKSTSGGTAALGCLVKDYFPEPVTVSWNSGALTSGVHTFPAVLQSSGLYSLSSVVTVPSSSLGTQTYICNVNHKPSNTKVDKKVDKTHTCPPCPPELLGGPSVFLFPPKPKDTLMISRTPEVTCVVVDVSHEDPEVKFNWYVDGVEVHNAKTKPREEQYNSTYRVVSVLTVLHQDWLNGKEYKCKVSNKALPAPIEKTISKAKQPREPQVYTLPPSREEMTKNQVSLTCLVKGFYPSDIAVEWESNGQPENNYKTTPPVLDSDGSFFLYSKLTVDKSRWQQGNVFSCSVMHEALHNHYTQKSLSLSPGK

SEQ ID NO: 1661 - protein, 442 aa, synthetic construct
  REGION 1..442: note = IgG1 Heavy Chain
QVQLVQSGAEVKKPGASVKVSCKASGYTFTDYYMHWVRQAPGQGLEWMGIINPSGGSTRYAQKFQGRVTMTRDTSTSTVYMELSSLRSEDTAVYYCARVDGRRWLRSDYWGQGTLVTVSSSTKGPSVFPLAPSSKSTSGGTAALGCLVKDYFPEPVTVSWNSGALTSGVHTFPAVLQSSGLYSLSSVVTVPSSSLGTQTYICNVNHKPSNTKVDKKVDKTHTCPPCPPELLGGPSVFLFPPKPKDTLMISRTPEVTCVVVDVSHEDPEVKFNWYVDGVEVHNAKTKPREEQYNSTYRVVSVLTVLHQDWLNGKEYKCKVSNKALPAPIEKTISKAKQPREPQVYTLPPSREEMTKNQVSLTCLVKGFYPSDIAVEWESNGQPENNYKTTPPVLDSDGSFFLYSKLTVDKSRWQQGNVFSCSVMHEALHNHYTQKSLSLSPGK

SEQ ID NO: 1662 - protein, 443 aa, synthetic construct
  REGION 1..443: note = IgG1 Heavy Chain
QVQLVQSGAEVKKPGASVKVSCKASGGTFSSYAISWVRQAPGQGLEWLGIISPSGRSAGYGRKFQGRVTMTRDTSTSTVYMELSSLRSEDTAVYYCARTDYGGHKWYFDLWGRGTLVTVSSSTKGPSVFPLAPSSKSTSGGTAALGCLVKDYFPEPVTVSWNSGALTSGVHTFPAVLQSSGLYSLSSVVTVPSSSLGTQTYICNVNHKPSNTKVDKKVDKTHTCPPCPPELLGGPSVFLFPPKPKDTLMISRTPEVTCVVVDVSHEDPEVKFNWYVDGVEVHNAKTKPREEQYNSTYRVVSVLTVLHQDWLNGKEYKCKVSNKALPAPIEKTISKAKQPREPQVYTLPPSREEMTKNQVSLTCLVKGFYPSDIAVEWESNGQPENNYKTTPPVLDSDGSFFLYSKLTVDKSRWQQGNVFSCSVMHEALHNHYTQKSLSLSPGK

SEQ ID NO: 1663 - protein, 441 aa, synthetic construct
  REGION 1..441: note = IgG1 Heavy Chain
QVQLVQSGAEVKKPGASVKVSCKASGYTFTGYYLHWVRQAPGQGLEWMGVISPSGGGTSYAQKFQGRVTMTRDTSTSTVYMELSSLRSEDTAVYYCARAGFGEGVFRHWGQGTLVTVSSSTKGPSVFPLAPSSKSTSGGTAALGCLVKDYFPEPVTVSWNSGALTSGVHTFPAVLQSSGLYSLSSVVTVPSSSLGTQTYICNVNHKPSNTKVDKKVDKTHTCPPCPPELLGGPSVFLFPPKPKDTLMISRTPEVTCVVVDVSHEDPEVKFNWYVDGVEVHNAKTKPREEQYNSTYRVVSVLTVLHQDWLNGKEYKCKVSNKALPAPIEKTISKAKQPREPQVYTLPPSREEMTKNQVSLTCLVKGFYPSDIAVEWESNGQPENNYKTTPPVLDSDGSFFLYSKLTVDKSRWQQGNVFSCSVMHEALHNHYTQKSLSLSPGK

SEQ ID NO: 1664 - protein, 444 aa, synthetic construct
  REGION 1..444: note = IgG1 Heavy Chain
QVQLVQSGAEVKKPGASVKVSCKASGYSFTSHAISWVRQAPGQGLEWMGWIKPNSGDTKYAQKFQGRVTMTRDTSTSTVYMELSSLRSEDTAVYYCARGSDDYYGSYYFDYWGQGTLVTVSSSTKGPSVFPLAPSSKSTSGGTAALGCLVKDYFPEPVTVSWNSGALTSGVHTFPAVLQSSGLYSLSSVVTVPSSSLGTQTYICNVNHKPSNTKVDKKVDKTHTCPPCPPELLGGPSVFLFPPKPKDTLMISRTPEVTCVVVDVSHEDPEVKFNWYVDGVEVHNAKTKPREEQYNSTYRVVSVLTVLHQDWLNGKEYKCKVSNKALPAPIEKTISKAKQPREPQVYTLPPSREEMTKNQVSLTCLVKGFYPSDIAVEWESNGQPENNYKTTPPVLDSDGSFFLYSKLTVDKSRWQQGNVFSCSVMHEALHNHYTQKSLSLSPGK

SEQ ID NO: 1665 - protein, 439 aa, synthetic construct
  REGION 1..439: note = IgG1 Heavy Chain
EVQLLESGGGLVQPGGSLRLSCAASGFTFRNYGMGWVRQAPGKGLEWVSAISGSGGSTYYADSVKGRFTISRDNSKNTLYLQMNSLRAEDTAVYYCARVKFYGMDVWGQGTTVTVSSSTKGPSVFPLAPSSKSTSGGTAALGCLVKDYFPEPVTVSWNSGALTSGVHTFPAVLQSSGLYSLSSVVTVPSSSLGTQTYICNVNHKPSNTKVDKKVDKTHTCPPCPPELLGGPSVFLFPPKPKDTLMISRTPEVTCVVVDVSHEDPEVKFNWYVDGVEVHNAKTKPREEQYNSTYRVVSVLTVLHQDWLNGKEYKCKVSNKALPAPIEKTISKAKQPREPQVYTLPPSREEMTKNQVSLTCLVKGFYPSDIAVEWESNGQPENNYKTTPPVLDSDGSFFLYSKLTVDKSRWQQGNVFSCSVMHEALHNHYTQKSLSLSPGK

SEQ ID NO: 1666 - protein, 444 aa, synthetic construct
  REGION 1..444: note = IgG1 Heavy Chain
QVQLVQSGAEVKKPGASVKVSCKASGYTFTDYHMHWVRQAPGQGLEWMGWMSPNSGNTGYAQNFQGRVTMTRDTSTSTVYMELSSLRSEDTAVYYCARADYYGSDYVKFDYWGQGTLVTVSSSTKGPSVFPLAPSSKSTSGGTAALGCLVKDYFPEPVTVSWNSGALTSGVHTFPAVLQSSGLYSLSSVVTVPSSSLGTQTYICNVNHKPSNTKVDKKVDKTHTCPPCPPELLGGPSVFLFPPKPKDTLMISRTPEVTCVVVDVSHEDPEVKFNWYVDGVEVHNAKTKPREEQYNSTYRVVSVLTVLHQDWLNGKEYKCKVSNKALPAPIEKTISKAKQPREPQVYTLPPSREEMTKNQVSLTCLVKGFYPSDIAVEWESNGQPENNYKTTPPVLDSDGSFFLYSKLTVDKSRWQQGNVFSCSVMHEALHNHYTQKSLSLSPGK

SEQ ID NO: 1667 - protein, 444 aa, synthetic construct
  REGION 1..444: note = IgG1 Heavy Chain
QVQLVQSGAEVKKPGASVKVSCKASGYTFPNYGISWVRQAPGQGLEWMGWINPNSGGTKYAQRFQGRVTMTRDTSTSTVYMELSSLRSEDTAVYYCARDRDILTGYYHFDYWGQGTLVTVSSSTKGPSVFPLAPSSKSTSGGTAALGCLVKDYFPEPVTVSWNSGALTSGVHTFPAVLQSSGLYSLSSVVTVPSSSLGTQTYICNVNHKPSNTKVDKKVDKTHTCPPCPPELLGGPSVFLFPPKPKDTLMISRTPEVTCVVVDVSHEDPEVKFNWYVDGVEVHNAKTKPREEQYNSTYRVVSVLTVLHQDWLNGKEYKCKVSNKALPAPIEKTISKAKQPREPQVYTLPPSREEMTKNQVSLTCLVKGFYPSDIAVEWESNGQPENNYKTTPPVLDSDGSFFLYSKLTVDKSRWQQGNVFSCSVMHEALHNHYTQKSLSLSPGK

SEQ ID NO: 1668 - protein, 446 aa, synthetic construct
  REGION 1..446: note = IgG1 Heavy Chain
QVQLVQSGAEVKKPGASVKVSCKASGYTFTDYFMHWVRQAPGQGLEWMGWINPNSGNTGYAQKFQGRVTMTRDTSTSTVYMELSSLRSEDTAVYYCARLNDYGDYGGPATLDYWGQGTLVTVSSSTKGPSVFPLAPSSKSTSGGTAALGCLVKDYFPEPVTVSWNSGALTSGVHTFPAVLQSSGLYSLSSVVTVPSSSLGTQTYICNVNHKPSNTKVDKKVDKTHTCPPCPPELLGGPSVFLFPPKPKDTLMISRTPEVTCVVVDVSHEDPEVKFNWYVDGVEVHNAKTKPREEQYNSTYRVVSVLTVLHQDWLNGKEYKCKVSNKALPAPIEKTISKAKQPREPQVYTLPPSREEMTKNQVSLTCLVKGFYPSDIAVEWESNGQPENNYKTTPPVLDSDGSFFLYSKLTVDKSRWQQGNVFSCSVMHEALHNHYTQKSLSLSPGK

SEQ ID NO: 1669 - protein, 439 aa, synthetic construct
  REGION 1..439: note = IgG1 Heavy Chain
QVQLVQSGAEVKKPGASVKVSCKASGYTFTNYYMHWVRQAPGQGLEWLGWISPYSGDTKYAQTLQGRVTMTRDTSTSTVYMELSSLRSEDTAVYYCARESMDRLDYWGQGTLVTVSSSTKGPSVFPLAPSSKSTSGGTAALGCLVKDYFPEPVTVSWNSGALTSGVHTFPAVLQSSGLYSLSSVVTVPSSSLGTQTYICNVNHKPSNTKVDKKVDKTHTCPPCPPELLGGPSVFLFPPKPKDTLMISRTPEVTCVVVDVSHEDPEVKFNWYVDGVEVHNAKTKPREEQYNSTYRVVSVLTVLHQDWLNGKEYKCKVSNKALPAPIEKTISKAKQPREPQVYTLPPSREEMTKNQVSLTCLVKGFYPSDIAVEWESNGQPENNYKTTPPVLDSDGSFFLYSKLTVDKSRWQQGNVFSCSVMHEALHNHYTQKSLSLSPGK

SEQ ID NO: 1670 - protein, 444 aa, synthetic construct
  REGION 1..444: note = IgG1 Heavy Chain
EVQLLESGGGLVQPGGSLRLSCAASGFTFSSYAMHWVRQAPGKGLEWVADISGSGGLTYYADSVKGRFTISRDNSKNTLYLQMNSLRAEDTAVYYCAREGDQYSSSSFFDYWGQGTLVTVSSSTKGPSVFPLAPSSKSTSGGTAALGCLVKDYFPEPVTVSWNSGALTSGVHTFPAVLQSSGLYSLSSVVTVPSSSLGTQTYICNVNHKPSNTKVDKKVDKTHTCPPCPPELLGGPSVFLFPPKPKDTLMISRTPEVTCVVVDVSHEDPEVKFNWYVDGVEVHNAKTKPREEQYNSTYRVVSVLTVLHQDWLNGKEYKCKVSNKALPAPIEKTISKAKQPREPQVYTLPPSREEMTKNQVSLTCLVKGFYPSDIAVEWESNGQPENNYKTTPPVLDSDGSFFLYSKLTVDKSRWQQGNVFSCSVMHEALHNHYTQKSLSLSPGK

SEQ ID NO: 1671 - protein, 440 aa, synthetic construct
  REGION 1..440: note = IgG1 Heavy Chain
EVQLVESGGGLVKPGGSLRLSCAASGFTFDEFGMNWVRQAPGKGLEWISYISGDSGYTNCADSVKGRFTISRDDSKNTLYLQMNSLKTEDTAVYYCAAGYGGYYFDYWGQGTLVTVSSSTKGPSVFPLAPSSKSTSGGTAALGCLVKDYFPEPVTVSWNSGALTSGVHTFPAVLQSSGLYSLSSVVTVPSSSLGTQTYICNVNHKPSNTKVDKKVDKTHTCPPCPPELLGGPSVFLFPPKPKDTLMISRTPEVTCVVVDVSHEDPEVKFNWYVDGVEVHNAKTKPREEQYNSTYRVVSVLTVLHQDWLNGKEYKCKVSNKALPAPIEKTISKAKQPREPQVYTLPPSREEMTKNQVSLTCLVKGFYPSDIAVEWESNGQPENNYKTTPPVLDSDGSFFLYSKLTVDKSRWQQGNVFSCSVMHEALHNHYTQKSLSLSPGK

SEQ ID NO: 1672 - protein, 443 aa, synthetic construct
  REGION 1..443: note = IgG1 Heavy Chain
QVQLVQSGAEVKKPGASVKVSCKASGYTFTSYYMHWVRQAPGQGLEWMGMINPSAGSTSYAQKFQGRVTMTRDTSTSTVYMELSSLRSEDTAVYYCASVDSSGWYAPFDYWGQGTLVTVSSSTKGPSVFPLAPSSKSTSGGTAALGCLVKDYFPEPVTVSWNSGALTSGVHTFPAVLQSSGLYSLSSVVTVPSSSLGTQTYICNVNHKPSNTKVDKKVDKTHTCPPCPPELLGGPSVFLFPPKPKDTLMISRTPEVTCVVVDVSHEDPEVKFNWYVDGVEVHNAKTKPREEQYNSTYRVVSVLTVLHQDWLNGKEYKCKVSNKALPAPIEKTISKAKQPREPQVYTLPPSREEMTKNQVSLTCLVKGFYPSDIAVEWESNGQPENNYKTTPPVLDSDGSFFLYSKLTVDKSRWQQGNVFSCSVMHEALHNHYTQKSLSLSPGK

SEQ ID NO: 1673 - protein, 448 aa, synthetic construct
  REGION 1..448: note = IgG1 Heavy Chain
EVQLLESGGGLVQPGGSLRLSCAASGFTFDEYAMHWVRQAPGKGLEWVSAIGAGGSTYYADSVKGRFTISRDNSKNTLYLQMNSLRAEDTAVYYCASSLGPELRGVDYYYYGMDVWGQGTTVTVSSSTKGPSVFPLAPSSKSTSGGTAALGCLVKDYFPEPVTVSWNSGALTSGVHTFPAVLQSSGLYSLSSVVTVPSSSLGTQTYICNVNHKPSNTKVDKKVDKTHTCPPCPPELLGGPSVFLFPPKPKDTLMISRTPEVTCVVVDVSHEDPEVKFNWYVDGVEVHNAKTKPREEQYNSTYRVVSVLTVLHQDWLNGKEYKCKVSNKALPAPIEKTISKAKQPREPQVYTLPPSREEMTKNQVSLTCLVKGFYPSDIAVEWESNGQPENNYKTTPPVLDSDGSFFLYSKLTVDKSRWQQGNVFSCSVMHEALHNHYTQKSLSLSPGK

SEQ ID NO: 1674 - protein, 435 aa, synthetic construct
  REGION 1..435: note = IgG1 Heavy Chain
EVQLLESGGGLVQPGGSLRLSCAASGFNFDDYAMHWVRQAPGKGLEWVSVIYSGGSTYYADSVKGRFTISRDNSKNTLYLQMNSLRAEDTAVYYCTRHDFDYWGQGTLVTVSSSTKGPSVFPLAPSSKSTSGGTAALGCLVKDYFPEPVTVSWNSGALTSGVHTFPAVLQSSGLYSLSSVVTVPSSSLGTQTYICNVNHKPSNTKVDKKVDKTHTCPPCPPELLGGPSVFLFPPKPKDTLMISRTPEVTCVVVDVSHEDPEVKFNWYVDGVEVHNAKTKPREEQYNSTYRVVSVLTVLHQDWLNGKEYKCKVSNKALPAPIEKTISKAKQPREPQVYTLPPSREEMTKNQVSLTCLVKGFYPSDIAVEWESNGQPENNYKTTPPVLDSDGSFFLYSKLTVDKSRWQQGNVFSCSVMHEALHNHYTQKSLSLSPGK

SEQ ID NO: 1675 - protein, 439 aa, synthetic construct
  REGION 1..439: note = IgG1 Heavy Chain
EVQLVESGGGLVKPGGSLRLSCAASGFTFSDYALHWVRQAPGKGLEWVSLISGDGGSTYYADSVKGRFTISRDDSKNTLYLQMNSLKTEDTAVYYCARDLGGERSYWGQGTLVTVSSSTKGPSVFPLAPSSKSTSGGTAALGCLVKDYFPEPVTVSWNSGALTSGVHTFPAVLQSSGLYSLSSVVTVPSSSLGTQTYICNVNHKPSNTKVDKKVDKTHTCPPCPPELLGGPSVFLFPPKPKDTLMISRTPEVTCVVVDVSHEDPEVKFNWYVDGVEVHNAKTKPREEQYNSTYRVVSVLTVLHQDWLNGKEYKCKVSNKALPAPIEKTISKAKQPREPQVYTLPPSREEMTKNQVSLTCLVKGFYPSDIAVEWESNGQPENNYKTTPPVLDSDGSFFLYSKLTVDKSRWQQGNVFSCSVMHEALHNHYTQKSLSLSPGK

SEQ ID NO: 1676 - protein, 446 aa, synthetic construct
  REGION 1..446: note = IgG1 Heavy Chain
QVQLVQSGAEVKKPGASVKVSCKASGYTFTDYYMHWVRQAPGQGLEWMGIINPSDGSTTYAQSFQGRVTMTRDTSTSTVYMELSSLRSEDTAVYYCARDELPDSSGWYGYFQHWGQGTLVTVSSSTKGPSVFPLAPSSKSTSGGTAALGCLVKDYFPEPVTVSWNSGALTSGVHTFPAVLQSSGLYSLSSVVTVPSSSLGTQTYICNVNHKPSNTKVDKKVDKTHTCPPCPPELLGGPSVFLFPPKPKDTLMISRTPEVTCVVVDVSHEDPEVKFNWYVDGVEVHNAKTKPREEQYNSTYRVVSVLTVLHQDWLNGKEYKCKVSNKALPAPIEKTISKAKQPREPQVYTLPPSREEMTKNQVSLTCLVKGFYPSDIAVEWESNGQPENNYKTTPPVLDSDGSFFLYSKLTVDKSRWQQGNVFSCSVMHEALHNHYTQKSLSLSPGK

SEQ ID NO: 1677 - protein, 440 aa, synthetic construct
  REGION 1..440: note = IgG1 Heavy Chain
QVQLVQSGAEVKKPGSSVKVSCKASGGTFSSYAISWVRQAPGQGLEWMGEIIPFFGTANYAQKFQGRVTITADESTSTAYMELSSLRSEDTAVYYCARAEYGGDLDYWGQGTLVTVSSSTKGPSVFPLAPSSKSTSGGTAALGCLVKDYFPEPVTVSWNSGALTSGVHTFPAVLQSSGLYSLSSVVTVPSSSLGTQTYICNVNHKPSNTKVDKKVDKTHTCPPCPPELLGGPSVFLFPPKPKDTLMISRTPEVTCVVVDVSHEDPEVKFNWYVDGVEVHNAKTKPREEQYNSTYRVVSVLTVLHQDWLNGKEYKCKVSNKALPAPIEKTISKAKQPREPQVYTLPPSREEMTKNQVSLTCLVKGFYPSDIAVEWESNGQPENNYKTTPPVLDSDGSFFLYSKLTVDKSRWQQGNVFSCSVMHEALHNHYTQKSLSLSPGK

SEQ ID NO: 1678 - protein, 444 aa, synthetic construct
  REGION 1..444: note = IgG1 Heavy Chain
QVQLVQSGAEVKKPGASVKVSCKASGDTFTRHYVHWVRQAPGQGLEWMGIINPRGGTHYAQKFQGRVTMTRDTSTSTVYMELSSLRSEDTAVYYCARRDCSGGSCYSDLDYWGQGTLVTVSSSTKGPSVFPLAPSSKSTSGGTAALGCLVKDYFPEPVTVSWNSGALTSGVHTFPAVLQSSGLYSLSSVVTVPSSSLGTQTYICNVNHKPSNTKVDKKVDKTHTCPPCPPELLGGPSVFLFPPKPKDTLMISRTPEVTCVVVDVSHEDPEVKFNWYVDGVEVHNAKTKPREEQYNSTYRVVSVLTVLHQDWLNGKEYKCKVSNKALPAPIEKTISKAKQPREPQVYTLPPSREEMTKNQVSLTCLVKGFYPSDIAVEWESNGQPENNYKTTPPVLDSDGSFFLYSKLTVDKSRWQQGNVFSCSVMHEALHNHYTQKSLSLSPGK

SEQ ID NO: 1679 - protein, 439 aa, synthetic construct
  REGION 1..439: note = IgG1 Heavy Chain
QVQLVQSGAEVKKPGASVKVSCKASGGTFSSYAISWVRQAPGQGLEWMGWINPDSGDASYARKFQGRVTMTRDTSTSTVYMELSSLRSEDTAVYYCATFGEEAFDIWGQGTMVTVSSSTKGPSVFPLAPSSKSTSGGTAALGCLVKDYFPEPVTVSWNSGALTSGVHTFPAVLQSSGLYSLSSVVTVPSSSLGTQTYICNVNHKPSNTKVDKKVDKTHTCPPCPPELLGGPSVFLFPPKPKDTLMISRTPEVTCVVVDVSHEDPEVKFNWYVDGVEVHNAKTKPREEQYNSTYRVVSVLTVLHQDWLNGKEYKCKVSNKALPAPIEKTISKAKQPREPQVYTLPPSREEMTKNQVSLTCLVKGFYPSDIAVEWESNGQPENNYKTTPPVLDSDGSFFLYSKLTVDKSRWQQGNVFSCSVMHEALHNHYTQKSLSLSPGK

SEQ ID NO: 1680 - protein, 445 aa, synthetic construct
  REGION 1..445: note = IgG1 Heavy Chain
QVQLVQSGAEVKKPGASVKVSCKASGGTFSSYAISWVRQAPGQGLEWMGWIDPKNGDTNYAQKFQGRVTMTRDTSTSTVYMELSSLRSEDTAVYYCATEGSHHPYYYYGMDVWGQGTTVTVSSSTKGPSVFPLAPSSKSTSGGTAALGCLVKDYFPEPVTVSWNSGALTSGVHTFPAVLQSSGLYSLSSVVTVPSSSLGTQTYICNVNHKPSNTKVDKKVDKTHTCPPCPPELLGGPSVFLFPPKPKDTLMISRTPEVTCVVVDVSHEDPEVKFNWYVDGVEVHNAKTKPREEQYNSTYRVVSVLTVLHQDWLNGKEYKCKVSNKALPAPIEKTISKAKQPREPQVYTLPPSREEMTKNQVSLTCLVKGFYPSDIAVEWESNGQPENNYKTTPPVLDSDGSFFLYSKLTVDKSRWQQGNVFSCSVMHEALHNHYTQKSLSLSPGK

SEQ ID NO: 1681 - protein, 448 aa, synthetic construct
  REGION 1..448: note = IgG1 Heavy Chain
QVQLVQSGAEVKKPGASVKVSCKASGYTFTGYHMHWVRQAPGQGLEWMGWINPNTGGTNYAQKFQGRVTMTRDTSTSTVYMELSSLRSEDTAVYYCARPNTAMVPPYYYYYGMDVWGQGTLVTVSSSTKGPSVFPLAPSSKSTSGGTAALGCLVKDYFPEPVTVSWNSGALTSGVHTFPAVLQSSGLYSLSSVVTVPSSSLGTQTYICNVNHKPSNTKVDKKVDKTHTCPPCPPELLGGPSVFLFPPKPKDTLMISRTPEVTCVVVDVSHEDPEVKFNWYVDGVEVHNAKTKPREEQYNSTYRVVSVLTVLHQDWLNGKEYKCKVSNKALPAPIEKTISKAKQPREPQVYTLPPSREEMTKNQVSLTCLVKGFYPSDIAVEWESNGQPENNYKTTPPVLDSDGSFFLYSKLTVDKSRWQQGNVFSCSVMHEALHNHYTQKSLSLSPGK

SEQ ID NO: 1682 - protein, 442 aa, synthetic construct
  REGION 1..442: note = IgG1 Heavy Chain
QVQLVQSGAEVKKPGASVKVSCKASGYTFTSYDINWVRQAPGQGLEWMGWMNPNSGNTGYAQKFQGRVTMTRDTSTSTVYMELSSLRSEDTAVYYCARVSATGTYGLDYWGQGTLVTVSSSTKGPSVFPLAPSSKSTSGGTAALGCLVKDYFPEPVTVSWNSGALTSGVHTFPAVLQSSGLYSLSSVVTVPSSSLGTQTYICNVNHKPSNTKVDKKVDKTHTCPPCPPELLGGPSVFLFPPKPKDTLMISRTPEVTCVVVDVSHEDPEVKFNWYVDGVEVHNAKTKPREEQYNSTYRVVSVLTVLHQDWLNGKEYKCKVSNKALPAPIEKTISKAKQPREPQVYTLPPSREEMTKNQVSLTCLVKGFYPSDIAVEWESNGQPENNYKTTPPVLDSDGSFFLYSKLTVDKSRWQQGNVFSCSVMHEALHNHYTQKSLSLSPGK

SEQ ID NO: 1683 - protein, 441 aa, synthetic construct
  REGION 1..441: note = IgG1 Heavy Chain
QVQLVQSGAEVKKPGASVKVSCKASGYTFNNYGITWVRQAPGQGLEWMGIINPITGVTTYAQNFQGRVTMTRDTSTSTVYMELSSLRSEDTAVYYCASGEQQLVLFDYWGQGTLVTVSSSTKGPSVFPLAPSSKSTSGGTAALGCLVKDYFPEPVTVSWNSGALTSGVHTFPAVLQSSGLYSLSSVVTVPSSSLGTQTYICNVNHKPSNTKVDKKVDKTHTCPPCPPELLGGPSVFLFPPKPKDTLMISRTPEVTCVVVDVSHEDPEVKFNWYVDGVEVHNAKTKPREEQYNSTYRVVSVLTVLHQDWLNGKEYKCKVSNKALPAPIEKTISKAKQPREPQVYTLPPSREEMTKNQVSLTCLVKGFYPSDIAVEWESNGQPENNYKTTPPVLDSDGSFFLYSKLTVDKSRWQQGNVFSCSVMHEALHNHYTQKSLSLSPGK

SEQ ID NO: 1684 - protein, 441 aa, synthetic construct
  REGION 1..441: note = IgG1 Heavy Chain
QVQLVQSGAEVKKPGASVKVSCKASGYTFTDYYLHWVRQAPGQGLEWMGWMNPNSGNTGYAQKFQGRVTMTRDTSTSTVYMELSSLRSEDTAVYYCAADVITAYGMDVWGQGTMVTVSSSTKGPSVFPLAPSSKSTSGGTAALGCLVKDYFPEPVTVSWNSGALTSGVHTFPAVLQSSGLYSLSSVVTVPSSSLGTQTYICNVNHKPSNTKVDKKVDKTHTCPPCPPELLGGPSVFLFPPKPKDTLMISRTPEVTCVVVDVSHEDPEVKFNWYVDGVEVHNAKTKPREEQYNSTYRVVSVLTVLHQDWLNGKEYKCKVSNKALPAPIEKTISKAKQPREPQVYTLPPSREEMTKNQVSLTCLVKGFYPSDIAVEWESNGQPENNYKTTPPVLDSDGSFFLYSKLTVDKSRWQQGNVFSCSVMHEALHNHYTQKSLSLSPGK

SEQ ID NO: 1685 - protein, 441 aa, synthetic construct
  REGION 1..441: note = IgG1 Heavy Chain
EVQLLESGGGLVQPGGSLRLSCAASGFTFSNAWMSWVRQAPGKGLEWVADISYDGTNDYYADSVKGRFTISRDNSKNTLYLQMNSLRAEDTAVYYCTTEELRFGGFDYWGQGTLVTVSSSTKGPSVFPLAPSSKSTSGGTAALGCLVKDYFPEPVTVSWNSGALTSGVHTFPAVLQSSGLYSLSSVVTVPSSSLGTQTYICNVNHKPSNTKVDKKVDKTHTCPPCPPELLGGPSVFLFPPKPKDTLMISRTPEVTCVVVDVSHEDPEVKFNWYVDGVEVHNAKTKPREEQYNSTYRVVSVLTVLHQDWLNGKEYKCKVSNKALPAPIEKTISKAKQPREPQVYTLPPSREEMTKNQVSLTCLVKGFYPSDIAVEWESNGQPENNYKTTPPVLDSDGSFFLYSKLTVDKSRWQQGNVFSCSVMHEALHNHYTQKSLSLSPGK

SEQ ID NO: 1686 - protein, 444 aa, synthetic construct
  REGION 1..444: note = IgG1 Heavy Chain
QVQLVQSGAEVKKPGSSVKVSCKASGGTFSSYAISWVRQAPGQGLEWMGGIIPMFGTANYAQKFQGRVTITADESTSTAYMELSSLRSEDTAVYYCARDLGYSNAGGTLHYWGQGTLVTVSSSTKGPSVFPLAPSSKSTSGGTAALGCLVKDYFPEPVTVSWNSGALTSGVHTFPAVLQSSGLYSLSSVVTVPSSSLGTQTYICNVNHKPSNTKVDKKVDKTHTCPPCPPELLGGPSVFLFPPKPKDTLMISRTPEVTCVVVDVSHEDPEVKFNWYVDGVEVHNAKTKPREEQYNSTYRVVSVLTVLHQDWLNGKEYKCKVSNKALPAPIEKTISKAKQPREPQVYTLPPSREEMTKNQVSLTCLVKGFYPSDIAVEWESNGQPENNYKTTPPVLDSDGSFFLYSKLTVDKSRWQQGNVFSCSVMHEALHNHYTQKSLSLSPGK

SEQ ID NO: 1687 - protein, 444 aa, synthetic construct
  REGION 1..444: note = IgG1 Heavy Chain
QVQLVQSGAEVKKPGASVKVSCKASGYTFTNYYMHWVRQAPGQGLEWMGIINPSGGSTSYAQKFQGRVTMTRDTSTSTVYMELSSLRSEDTAVYYCARAEWDILTGYYIDYWGQGTLVTVSSSTKGPSVFPLAPSSKSTSGGTAALGCLVKDYFPEPVTVSWNSGALTSGVHTFPAVLQSSGLYSLSSVVTVPSSSLGTQTYICNVNHKPSNTKVDKKVDKTHTCPPCPPELLGGPSVFLFPPKPKDTLMISRTPEVTCVVVDVSHEDPEVKFNWYVDGVEVHNAKTKPREEQYNSTYRVVSVLTVLHQDWLNGKEYKCKVSNKALPAPIEKTISKAKQPREPQVYTLPPSREEMTKNQVSLTCLVKGFYPSDIAVEWESNGQPENNYKTTPPVLDSDGSFFLYSKLTVDKSRWQQGNVFSCSVMHEALHNHYTQKSLSLSPGK

SEQ ID NO: 1688 - protein, 440 aa, synthetic construct
  REGION 1..440: note = IgG1 Heavy Chain
QVQLVQSGAEVKKPGASVKVSCKASGYTFTDHFVHWVRQAPGQGLEWMGWISAYNGNTNYAQKFQGRVTMTRDTSTSTVYMELSSLRSEDTAVYYCARAEYSYGFDYWGQGTLVTVSSSTKGPSVFPLAPSSKSTSGGTAALGCLVKDYFPEPVTVSWNSGALTSGVHTFPAVLQSSGLYSLSSVVTVPSSSLGTQTYICNVNHKPSNTKVDKKVDKTHTCPPCPPELLGGPSVFLFPPKPKDTLMISRTPEVTCVVVDVSHEDPEVKFNWYVDGVEVHNAKTKPREEQYNSTYRVVSVLTVLHQDWLNGKEYKCKVSNKALPAPIEKTISKAKQPREPQVYTLPPSREEMTKNQVSLTCLVKGFYPSDIAVEWESNGQPENNYKTTPPVLDSDGSFFLYSKLTVDKSRWQQGNVFSCSVMHEALHNHYTQKSLSLSPGK

SEQ ID NO: 1689 - protein, 443 aa, synthetic construct
  REGION 1..443: note = IgG1 Heavy Chain
QVQLVQSGAEVKKPGASVKVSCKASGYTFTGYYVHWVRQAPGQGLEWMGVINPSGGGSPSYAQKFQGRVTMTRDTSTSTVYMELSSLRSEDTAVYYCARDRSDVDYGMDVWGQGTTVTVSSSTKGPSVFPLAPSSKSTSGGTAALGCLVKDYFPEPVTVSWNSGALTSGVHTFPAVLQSSGLYSLSSVVTVPSSSLGTQTYICNVNHKPSNTKVDKKVDKTHTCPPCPPELLGGPSVFLFPPKPKDTLMISRTPEVTCVVVDVSHEDPEVKFNWYVDGVEVHNAKTKPREEQYNSTYRVVSVLTVLHQDWLNGKEYKCKVSNKALPAPIEKTISKAKQPREPQVYTLPPSREEMTKNQVSLTCLVKGFYPSDIAVEWESNGQPENNYKTTPPVLDSDGSFFLYSKLTVDKSRWQQGNVFSCSVMHEALHNHYTQKSLSLSPGK

SEQ ID NO: 1690 - protein, 442 aa, synthetic construct
  REGION 1..442: note = IgG1 Heavy Chain
QVQLVQSGAEVKKPGASVKVSCKASGYTFTDYYMHWVRQAPGQGLEWMGLIDPSGGSTNSLQKFQGRVTMTRDTSTSTVYMELSSLRSEDTAVYYCARDVGFGELSFDIWGQGTTVTVSSSTKGPSVFPLAPSSKSTSGGTAALGCLVKDYFPEPVTVSWNSGALTSGVHTFPAVLQSSGLYSLSSVVTVPSSSLGTQTYICNVNHKPSNTKVDKKVDKTHTCPPCPPELLGGPSVFLFPPKPKDTLMISRTPEVTCVVVDVSHEDPEVKFNWYVDGVEVHNAKTKPREEQYNSTYRVVSVLTVLHQDWLNGKEYKCKVSNKALPAPIEKTISKAKQPREPQVYTLPPSREEMTKNQVSLTCLVKGFYPSDIAVEWESNGQPENNYKTTPPVLDSDGSFFLYSKLTVDKSRWQQGNVFSCSVMHEALHNHYTQKSLSLSPGK

SEQ ID NO: 1691 - protein, 446 aa, synthetic construct
  REGION 1..446: note = IgG1 Heavy Chain
QVQLVQSGAEVKKPGASVKVSCKASGYTFTGYYMHWVRQAPGQGLEWMGWINPNSGGTNYAQKFQGRVTMTRDTSTSTVYMELSSLRSEDTAVYYCAREIGGYDNYYYYGMDVWGQGTTVTVSSSTKGPSVFPLAPSSKSTSGGTAALGCLVKDYFPEPVTVSWNSGALTSGVHTFPAVLQSSGLYSLSSVVTVPSSSLGTQTYICNVNHKPSNTKVDKKVDKTHTCPPCPPELLGGPSVFLFPPKPKDTLMISRTPEVTCVVVDVSHEDPEVKFNWYVDGVEVHNAKTKPREEQYNSTYRVVSVLTVLHQDWLNGKEYKCKVSNKALPAPIEKTISKAKQPREPQVYTLPPSREEMTKNQVSLTCLVKGFYPSDIAVEWESNGQPENNYKTTPPVLDSDGSFFLYSKLTVDKSRWQQGNVFSCSVMHEALHNHYTQKSLSLSPGK

SEQ ID NO: 1692 - protein, 440 aa, synthetic construct
  REGION 1..440: note = IgG1 Heavy Chain
QVQLVQSGAEVKKPGASVKVSCKASGYTFNTYYMHWVRQAPGQGLEWMGWMHPNTGNTGYAQKFQGRVTMTRDTSTSTVYMELSSLRSEDTAVYYCARGTTSDAFDIWGQGTMVTVSSSTKGPSVFPLAPSSKSTSGGTAALGCLVKDYFPEPVTVSWNSGALTSGVHTFPAVLQSSGLYSLSSVVTVPSSSLGTQTYICNVNHKPSNTKVDKKVDKTHTCPPCPPELLGGPSVFLFPPKPKDTLMISRTPEVTCVVVDVSHEDPEVKFNWYVDGVEVHNAKTKPREEQYNSTYRVVSVLTVLHQDWLNGKEYKCKVSNKALPAPIEKTISKAKQPREPQVYTLPPSREEMTKNQVSLTCLVKGFYPSDIAVEWESNGQPENNYKTTPPVLDSDGSFFLYSKLTVDKSRWQQGNVFSCSVMHEALHNHYTQKSLSLSPGK

SEQ ID NO: 1693 - protein, 448 aa, synthetic construct
  REGION 1..448: note = IgG1 Heavy Chain
QVQLVQSGAEVKKPGASVKVSCKASGDTFTRHYVHWVRQAPGQGLEWMGRVNPRDGRTNSAQKFQGRVTMTRDTSTSTVYMELSSLRSEDTAVYYCAKDMFPTVTGTYYYYGMDVWGQGTTVTVSSSTKGPSVFPLAPSSKSTSGGTAALGCLVKDYFPEPVTVSWNSGALTSGVHTFPAVLQSSGLYSLSSVVTVPSSSLGTQTYICNVNHKPSNTKVDKKVDKTHTCPPCPPELLGGPSVFLFPPKPKDTLMISRTPEVTCVVVDVSHEDPEVKFNWYVDGVEVHNAKTKPREEQYNSTYRVVSVLTVLHQDWLNGKEYKCKVSNKALPAPIEKTISKAKQPREPQVYTLPPSREEMTKNQVSLTCLVKGFYPSDIAVEWESNGQPENNYKTTPPVLDSDGSFFLYSKLTVDKSRWQQGNVFSCSVMHEALHNHYTQKSLSLSPGK

SEQ ID NO: 1694 - protein, 441 aa, synthetic construct
  REGION 1..441: note = IgG1 Heavy Chain
QVQLVQSGAEVKKPGASVKVSCKASGYTFSSYDINWVRQAPGQGLEWVGWINPRNGGTDYAQKFQGRVTMTRDTSTSTVYMELSSLRSEDTAVYYCARHRWELDSFDYWGQGTLVTVSSSTKGPSVFPLAPSSKSTSGGTAALGCLVKDYFPEPVTVSWNSGALTSGVHTFPAVLQSSGLYSLSSVVTVPSSSLGTQTYICNVNHKPSNTKVDKKVDKTHTCPPCPPELLGGPSVFLFPPKPKDTLMISRTPEVTCVVVDVSHEDPEVKFNWYVDGVEVHNAKTKPREEQYNSTYRVVSVLTVLHQDWLNGKEYKCKVSNKALPAPIEKTISKAKQPREPQVYTLPPSREEMTKNQVSLTCLVKGFYPSDIAVEWESNGQPENNYKTTPPVLDSDGSFFLYSKLTVDKSRWQQGNVFSCSVMHEALHNHYTQKSLSLSPGK

SEQ ID NO: 1695 - protein, 441 aa, synthetic construct
  REGION 1..441: note = IgG1 Heavy Chain
QVQLVQSGAEVKKPGASVKVSCKASGYTFTSYYIHWVRQAPGQGLEWMGWMNPNDGKTAYAQRFQGRVTMTRDTSTSTVYMELSSLRSEDTAVYYCARDDDYGGYVAYWGQGTLVTVSSSTKGPSVFPLAPSSKSTSGGTAALGCLVKDYFPEPVTVSWNSGALTSGVHTFPAVLQSSGLYSLSSVVTVPSSSLGTQTYICNVNHKPSNTKVDKKVDKTHTCPPCPPELLGGPSVFLFPPKPKDTLMISRTPEVTCVVVDVSHEDPEVKFNWYVDGVEVHNAKTKPREEQYNSTYRVVSVLTVLHQDWLNGKEYKCKVSNKALPAPIEKTISKAKQPREPQVYTLPPSREEMTKNQVSLTCLVKGFYPSDIAVEWESNGQPENNYKTTPPVLDSDGSFFLYSKLTVDKSRWQQGNVFSCSVMHEALHNHYTQKSLSLSPGK

SEQ ID NO: 1696 - protein, 438 aa, synthetic construct
  REGION 1..438: note = IgG1 Heavy Chain
EVQLLESGGGLVQPGGSLRLSCAASGMSVTSNHMSWVRQAPGKGLEWVSSIYPDGKTYYADSVKGRFTISRDNSKNTLYLQMNSLRAEDTAVYYCARDEEDWFDPWGQGTLVTVSSSTKGPSVFPLAPSSKSTSGGTAALGCLVKDYFPEPVTVSWNSGALTSGVHTFPAVLQSSGLYSLSSVVTVPSSSLGTQTYICNVNHKPSNTKVDKKVDKTHTCPPCPPELLGGPSVFLFPPKPKDTLMISRTPEVTCVVVDVSHEDPEVKFNWYVDGVEVHNAKTKPREEQYNSTYRVVSVLTVLHQDWLNGKEYKCKVSNKALPAPIEKTISKAKQPREPQVYTLPPSREEMTKNQVSLTCLVKGFYPSDIAVEWESNGQPENNYKTTPPVLDSDGSFFLYSKLTVDKSRWQQGNVFSCSVMHEALHNHYTQKSLSLSPGK

SEQ ID NO: 1697 - protein, 441 aa, synthetic construct
  REGION 1..441: note = IgG1 Heavy Chain
EVQLLESGGGLVQPGGSLRLSCAASGFTFSNHYMSWVRQAPGKGLEWVAVIWPDGSKEYYADSVKGRFTISRDNSKNTLYLQMNSLRAEDTAVYYCAREDYYGSGMDYWGQGTLVTVSSSTKGPSVFPLAPSSKSTSGGTAALGCLVKDYFPEPVTVSWNSGALTSGVHTFPAVLQSSGLYSLSSVVTVPSSSLGTQTYICNVNHKPSNTKVDKKVDKTHTCPPCPPELLGGPSVFLFPPKPKDTLMISRTPEVTCVVVDVSHEDPEVKFNWYVDGVEVHNAKTKPREEQYNSTYRVVSVLTVLHQDWLNGKEYKCKVSNKALPAPIEKTISKAKQPREPQVYTLPPSREEMTKNQVSLTCLVKGFYPSDIAVEWESNGQPENNYKTTPPVLDSDGSFFLYSKLTVDKSRWQQGNVFSCSVMHEALHNHYTQKSLSLSPGK

SEQ ID NO: 1698 - protein, 437 aa, synthetic construct
  REGION 1..437: note = IgG1 Heavy Chain
QVQLVQSGAEVKKPGASVKVSCKASGGTFSNYAISWVRQAPGQGLEWMGWISAYNGNSDYAQNLQGRVTMTRDTSTSTVYMELSSLRSEDTAVYYCAIGDYFDYWGQGTLVTVSSSTKGPSVFPLAPSSKSTSGGTAALGCLVKDYFPEPVTVSWNSGALTSGVHTFPAVLQSSGLYSLSSVVTVPSSSLGTQTYICNVNHKPSNTKVDKKVDKTHTCPPCPPELLGGPSVFLFPPKPKDTLMISRTPEVTCVVVDVSHEDPEVKFNWYVDGVEVHNAKTKPREEQYNSTYRVVSVLTVLHQDWLNGKEYKCKVSNKALPAPIEKTISKAKQPREPQVYTLPPSREEMTKNQVSLTCLVKGFYPSDIAVEWESNGQPENNYKTTPPVLDSDGSFFLYSKLTVDKSRWQQGNVFSCSVMHEALHNHYTQKSLSLSPGK

SEQ ID NO: 1699 - protein, 440 aa, synthetic construct
  REGION 1..440: note = IgG1 Heavy Chain
EVQLLESGGGLVQPGGSLRLSCAASGFTVSSNYMSWVRQAPGKGLEWVAVIYSDGKTYYADSVKGRFTISRDNSKNTLYLQMNSLRAEDTAVYYCAREDSSGSHFDYWGQGTLVTVSSSTKGPSVFPLAPSSKSTSGGTAALGCLVKDYFPEPVTVSWNSGALTSGVHTFPAVLQSSGLYSLSSVVTVPSSSLGTQTYICNVNHKPSNTKVDKKVDKTHTCPPCPPELLGGPSVFLFPPKPKDTLMISRTPEVTCVVVDVSHEDPEVKFNWYVDGVEVHNAKTKPREEQYNSTYRVVSVLTVLHQDWLNGKEYKCKVSNKALPAPIEKTISKAKQPREPQVYTLPPSREEMTKNQVSLTCLVKGFYPSDIAVEWESNGQPENNYKTTPPVLDSDGSFFLYSKLTVDKSRWQQGNVFSCSVMHEALHNHYTQKSLSLSPGK

SEQ ID NO: 1700 - protein, 442 aa, synthetic construct
  REGION 1..442: note = IgG1 Heavy Chain
QVQLVQSGAEVKKPGSSVKVSCKASGYTFTKYEINWVRQAPGQGLEWMGGIIPIFGTANYAQKFQGRVTITADESTSTAYMELSSLRSEDTAVYYCARGSGWYTPLFDYWGQGTLVTVSSSTKGPSVFPLAPSSKSTSGGTAALGCLVKDYFPEPVTVSWNSGALTSGVHTFPAVLQSSGLYSLSSVVTVPSSSLGTQTYICNVNHKPSNTKVDKKVDKTHTCPPCPPELLGGPSVFLFPPKPKDTLMISRTPEVTCVVVDVSHEDPEVKFNWYVDGVEVHNAKTKPREEQYNSTYRVVSVLTVLHQDWLNGKEYKCKVSNKALPAPIEKTISKAKQPREPQVYTLPPSREEMTKNQVSLTCLVKGFYPSDIAVEWESNGQPENNYKTTPPVLDSDGSFFLYSKLTVDKSRWQQGNVFSCSVMHEALHNHYTQKSLSLSPGK

SEQ ID NO: 1701 - protein, 443 aa, synthetic construct
  REGION 1..443: note = IgG1 Heavy Chain
QVQLVQSGAEVKKPGASVKVSCKASGYTFTDYYIHWVRQAPGQGLEWMGLIDPSGGSTSIAQKFQGRVTMTRDTSTSTVYMELSSLRSEDTAVYYCARDYDILTGSGFDPWGQGTLVTVSSSTKGPSVFPLAPSSKSTSGGTAALGCLVKDYFPEPVTVSWNSGALTSGVHTFPAVLQSSGLYSLSSVVTVPSSSLGTQTYICNVNHKPSNTKVDKKVDKTHTCPPCPPELLGGPSVFLFPPKPKDTLMISRTPEVTCVVVDVSHEDPEVKFNWYVDGVEVHNAKTKPREEQYNSTYRVVSVLTVLHQDWLNGKEYKCKVSNKALPAPIEKTISKAKQPREPQVYTLPPSREEMTKNQVSLTCLVKGFYPSDIAVEWESNGQPENNYKTTPPVLDSDGSFFLYSKLTVDKSRWQQGNVFSCSVMHEALHNHYTQKSLSLSPGK

SEQ ID NO: 1702 - protein, 444 aa, synthetic construct
  REGION 1..444: note = IgG1 Heavy Chain
QVQLVQSGAEVKKPGASVKVSCKASGYTFTTYYMHWVRQAPGQGLEWMGIINVSAGTTSYAQKFQGRVTMTRDTSTSTVYMELSSLRSEDTAVYYCAKEPYPHQSGWFFDYWGQGTLVTVSSSTKGPSVFPLAPSSKSTSGGTAALGCLVKDYFPEPVTVSWNSGALTSGVHTFPAVLQSSGLYSLSSVVTVPSSSLGTQTYICNVNHKPSNTKVDKKVDKTHTCPPCPPELLGGPSVFLFPPKPKDTLMISRTPEVTCVVVDVSHEDPEVKFNWYVDGVEVHNAKTKPREEQYNSTYRVVSVLTVLHQDWLNGKEYKCKVSNKALPAPIEKTISKAKQPREPQVYTLPPSREEMTKNQVSLTCLVKGFYPSDIAVEWESNGQPENNYKTTPPVLDSDGSFFLYSKLTVDKSRWQQGNVFSCSVMHEALHNHYTQKSLSLSPGK

SEQ ID NO: 1703 - protein, 440 aa, synthetic construct
  REGION 1..440: note = IgG1 Heavy Chain
QVQLVQSGAEVKKPGASVKVSCKASGYTFTGHYMHWVRQAPGQGLEWMGWISTDNGNANYAQKFQGRVTMTRDTSTSTVYMELSSLRSEDTAVYYCARDTADYYFDYWGQGTLVTVSSSTKGPSVFPLAPSSKSTSGGTAALGCLVKDYFPEPVTVSWNSGALTSGVHTFPAVLQSSGLYSLSSVVTVPSSSLGTQTYICNVNHKPSNTKVDKKVDKTHTCPPCPPELLGGPSVFLFPPKPKDTLMISRTPEVTCVVVDVSHEDPEVKFNWYVDGVEVHNAKTKPREEQYNSTYRVVSVLTVLHQDWLNGKEYKCKVSNKALPAPIEKTISKAKQPREPQVYTLPPSREEMTKNQVSLTCLVKGFYPSDIAVEWESNGQPENNYKTTPPVLDSDGSFFLYSKLTVDKSRWQQGNVFSCSVMHEALHNHYTQKSLSLSPGK

SEQ ID NO: 1704 - protein, 439 aa, synthetic construct
  REGION 1..439: note = IgG1 Heavy Chain
QVQLVQSGAEVKKPGSSVKVSCKASGGTFSRYPFSWVRQAPGQGLEWMGWMNPNNGDTGYAQKFQGRVTITADESTSTAYMELSSLRSEDTAVYYCARGDYPYMDVWGKGTTVTVSSSTKGPSVFPLAPSSKSTSGGTAALGCLVKDYFPEPVTVSWNSGALTSGVHTFPAVLQSSGLYSLSSVVTVPSSSLGTQTYICNVNHKPSNTKVDKKVDKTHTCPPCPPELLGGPSVFLFPPKPKDTLMISRTPEVTCVVVDVSHEDPEVKFNWYVDGVEVHNAKTKPREEQYNSTYRVVSVLTVLHQDWLNGKEYKCKVSNKALPAPIEKTISKAKQPREPQVYTLPPSREEMTKNQVSLTCLVKGFYPSDIAVEWESNGQPENNYKTTPPVLDSDGSFFLYSKLTVDKSRWQQGNVFSCSVMHEALHNHYTQKSLSLSPGK

SEQ ID NO: 1705 - protein, 439 aa, synthetic construct
  REGION 1..439: note = IgG1 Heavy Chain
QVQLVQSGAEVKKPGASVKVSCKASGYTFTSDYMHWVRQAPGQGLEWMGWMNPNSGGTNYAQKFQGRVTMTRDTSTSTVYMELSSLRSEDTAVYYCARDYITGPSDWGQGTLVTVSSSTKGPSVFPLAPSSKSTSGGTAALGCLVKDYFPEPVTVSWNSGALTSGVHTFPAVLQSSGLYSLSSVVTVPSSSLGTQTYICNVNHKPSNTKVDKKVDKTHTCPPCPPELLGGPSVFLFPPKPKDTLMISRTPEVTCVVVDVSHEDPEVKFNWYVDGVEVHNAKTKPREEQYNSTYRVVSVLTVLHQDWLNGKEYKCKVSNKALPAPIEKTISKAKQPREPQVYTLPPSREEMTKNQVSLTCLVKGFYPSDIAVEWESNGQPENNYKTTPPVLDSDGSFFLYSKLTVDKSRWQQGNVFSCSVMHEALHNHYTQKSLSLSPGK

SEQ ID NO: 1706 - protein, 442 aa, synthetic construct
  REGION 1..442: note = IgG1 Heavy Chain
QVQLVQSGAEVKKPGASVKVSCKASGFTFTSYYMHWVRQAPGQGLEWMGWMNPNSGNTGYAQRFQGRVTMTRDTSTSTVYMELSSLRSEDTAVYYCARGHSRTDYGMDVWGQGTTVTVSSSTKGPSVFPLAPSSKSTSGGTAALGCLVKDYFPEPVTVSWNSGALTSGVHTFPAVLQSSGLYSLSSVVTVPSSSLGTQTYICNVNHKPSNTKVDKKVDKTHTCPPCPPELLGGPSVFLFPPKPKDTLMISRTPEVTCVVVDVSHEDPEVKFNWYVDGVEVHNAKTKPREEQYNSTYRVVSVLTVLHQDWLNGKEYKCKVSNKALPAPIEKTISKAKQPREPQVYTLPPSREEMTKNQVSLTCLVKGFYPSDIAVEWESNGQPENNYKTTPPVLDSDGSFFLYSKLTVDKSRWQQGNVFSCSVMHEALHNHYTQKSLSLSPGK

SEQ ID NO: 1707 - protein, 442 aa, synthetic construct
  REGION 1..442: note = IgG1 Heavy Chain
EVQLLESGGGLVQPGGSLRLSCAASGFTFSDHYMSWVRQAPGKGLEWVSIIYPDGKTYYADSVKGRFTISRDNSKNTLYLQMNSLRAEDTAVYYCAREGSYGDYDGMDVWGQGTTVTVSSSTKGPSVFPLAPSSKSTSGGTAALGCLVKDYFPEPVTVSWNSGALTSGVHTFPAVLQSSGLYSLSSVVTVPSSSLGTQTYICNVNHKPSNTKVDKKVDKTHTCPPCPPELLGGPSVFLFPPKPKDTLMISRTPEVTCVVVDVSHEDPEVKFNWYVDGVEVHNAKTKPREEQYNSTYRVVSVLTVLHQDWLNGKEYKCKVSNKALPAPIEKTISKAKQPREPQVYTLPPSREEMTKNQVSLTCLVKGFYPSDIAVEWESNGQPENNYKTTPPVLDSDGSFFLYSKLTVDKSRWQQGNVFSCSVMHEALHNHYTQKSLSLSPGK

SEQ ID NO: 1708 - protein, 441 aa, synthetic construct
  REGION 1..441: note = IgG1 Heavy Chain
QVQLVQSGAEVKKPGSSVKVSCKASGGTFSNYDISWVRQAPGQGLEWMGGIIPIFGTANYAQKFQGRVTITADESTSTAYMELSSLRSEDTAVYYCAREAEEGGWFDPWGQGTLVTVSSSTKGPSVFPLAPSSKSTSGGTAALGCLVKDYFPEPVTVSWNSGALTSGVHTFPAVLQSSGLYSLSSVVTVPSSSLGTQTYICNVNHKPSNTKVDKKVDKTHTCPPCPPELLGGPSVFLFPPKPKDTLMISRTPEVTCVVVDVSHEDPEVKFNWYVDGVEVHNAKTKPREEQYNSTYRVVSVLTVLHQDWLNGKEYKCKVSNKALPAPIEKTISKAKQPREPQVYTLPPSREEMTKNQVSLTCLVKGFYPSDIAVEWESNGQPENNYKTTPPVLDSDGSFFLYSKLTVDKSRWQQGNVFSCSVMHEALHNHYTQKSLSLSPGK

SEQ ID NO: 1709 - protein, 444 aa, synthetic construct
  REGION 1..444: note = IgG1 Heavy Chain
QVQLVQSGAEVKKPGASVKVSCKASGYTFTDYYMHWVRQAPGQGLEWMGWMNPNSGYTAYAQKFQGRVTMTRDTSTSTVYMELSSLRSEDTAVYYCAKDTPGSGWSSGMDVWGQGTTVTVSSSTKGPSVFPLAPSSKSTSGGTAALGCLVKDYFPEPVTVSWNSGALTSGVHTFPAVLQSSGLYSLSSVVTVPSSSLGTQTYICNVNHKPSNTKVDKKVDKTHTCPPCPPELLGGPSVFLFPPKPKDTLMISRTPEVTCVVVDVSHEDPEVKFNWYVDGVEVHNAKTKPREEQYNSTYRVVSVLTVLHQDWLNGKEYKCKVSNKALPAPIEKTISKAKQPREPQVYTLPPSREEMTKNQVSLTCLVKGFYPSDIAVEWESNGQPENNYKTTPPVLDSDGSFFLYSKLTVDKSRWQQGNVFSCSVMHEALHNHYTQKSLSLSPGK

SEQ ID NO: 1710 - protein, 444 aa, synthetic construct
  REGION 1..444: note = IgG1 Heavy Chain
QVQLVQSGAEVKKPGASVKVSCKASGGTFSNYAISWVRQAPGQGLEWMGWINPNSGGTNYAQKFQGRVTMTRDTSTSTVYMELSSLRSEDTAVYYCARVGYYDSSGGGMDVWGQGTTVTVSSSTKGPSVFPLAPSSKSTSGGTAALGCLVKDYFPEPVTVSWNSGALTSGVHTFPAVLQSSGLYSLSSVVTVPSSSLGTQTYICNVNHKPSNTKVDKKVDKTHTCPPCPPELLGGPSVFLFPPKPKDTLMISRTPEVTCVVVDVSHEDPEVKFNWYVDGVEVHNAKTKPREEQYNSTYRVVSVLTVLHQDWLNGKEYKCKVSNKALPAPIEKTISKAKQPREPQVYTLPPSREEMTKNQVSLTCLVKGFYPSDIAVEWESNGQPENNYKTTPPVLDSDGSFFLYSKLTVDKSRWQQGNVFSCSVMHEALHNHYTQKSLSLSPGK

SEQ ID NO: 1711 - protein, 444 aa, synthetic construct
  REGION 1..444: note = IgG1 Heavy Chain
QVQLVQSGAEVKKPGASVKVSCKASGYTFTGYYMHWVRQAPGQGLEWMGIINPIGGLTTYAQKFQGRVTMTRDTSTSTVYMELSSLRSEDTAVYYCASGAYGDYVDWYFDLWGRGTLVTVSSSTKGPSVFPLAPSSKSTSGGTAALGCLVKDYFPEPVTVSWNSGALTSGVHTFPAVLQSSGLYSLSSVVTVPSSSLGTQTYICNVNHKPSNTKVDKKVDKTHTCPPCPPELLGGPSVFLFPPKPKDTLMISRTPEVTCVVVDVSHEDPEVKFNWYVDGVEVHNAKTKPREEQYNSTYRVVSVLTVLHQDWLNGKEYKCKVSNKALPAPIEKTISKAKQPREPQVYTLPPSREEMTKNQVSLTCLVKGFYPSDIAVEWESNGQPENNYKTTPPVLDSDGSFFLYSKLTVDKSRWQQGNVFSCSVMHEALHNHYTQKSLSLSPGK

SEQ ID NO: 1712 - protein, 441 aa, synthetic construct
  REGION 1..441: note = IgG1 Heavy Chain
QVQLVQSGAEVKKPGASVKVSCKASGYTFTTYGISWVRQAPGQGLEWMGWINPNSGDTNYAQKFQGRVTMTRDTSTSTVYMELSSLRSEDTAVYYCARLTTATDSFDLWGRGTLVTVSSSTKGPSVFPLAPSSKSTSGGTAALGCLVKDYFPEPVTVSWNSGALTSGVHTFPAVLQSSGLYSLSSVVTVPSSSLGTQTYICNVNHKPSNTKVDKKVDKTHTCPPCPPELLGGPSVFLFPPKPKDTLMISRTPEVTCVVVDVSHEDPEVKFNWYVDGVEVHNAKTKPREEQYNSTYRVVSVLTVLHQDWLNGKEYKCKVSNKALPAPIEKTISKAKQPREPQVYTLPPSREEMTKNQVSLTCLVKGFYPSDIAVEWESNGQPENNYKTTPPVLDSDGSFFLYSKLTVDKSRWQQGNVFSCSVMHEALHNHYTQKSLSLSPGK

SEQ ID NO: 1713 - protein, 440 aa, synthetic construct
  REGION 1..440: note = IgG1 Heavy Chain
QVQLVQSGAEVKKPGASVKVSCKASGYSFTNYYIHWVRQAPGQGLEWMGWMNPYTGQTGYAQKFQGRVTMTRDTSTSTVYMELSSLRSEDTAVYYCTTDEETMDFHLWGRGTLVTVSSSTKGPSVFPLAPSSKSTSGGTAALGCLVKDYFPEPVTVSWNSGALTSGVHTFPAVLQSSGLYSLSSVVTVPSSSLGTQTYICNVNHKPSNTKVDKKVDKTHTCPPCPPELLGGPSVFLFPPKPKDTLMISRTPEVTCVVVDVSHEDPEVKFNWYVDGVEVHNAKTKPREEQYNSTYRVVSVLTVLHQDWLNGKEYKCKVSNKALPAPIEKTISKAKQPREPQVYTLPPSREEMTKNQVSLTCLVKGFYPSDIAVEWESNGQPENNYKTTPPVLDSDGSFFLYSKLTVDKSRWQQGNVFSCSVMHEALHNHYTQKSLSLSPGK

SEQ ID NO: 1714 - protein, 444 aa, synthetic construct
  REGION 1..444: note = IgG1 Heavy Chain
QVQLVQSGAEVKKPGASVKVSCKASGYTFTGYHIHWVRQAPGQGLEWMGRINPNSGGTDYAQKFQGRVTMTRDTSTSTVYMELSSLRSEDTAVYYCARETYSGSYEESFDYWGQGTLVTVSSSTKGPSVFPLAPSSKSTSGGTAALGCLVKDYFPEPVTVSWNSGALTSGVHTFPAVLQSSGLYSLSSVVTVPSSSLGTQTYICNVNHKPSNTKVDKKVDKTHTCPPCPPELLGGPSVFLFPPKPKDTLMISRTPEVTCVVVDVSHEDPEVKFNWYVDGVEVHNAKTKPREEQYNSTYRVVSVLTVLHQDWLNGKEYKCKVSNKALPAPIEKTISKAKQPREPQVYTLPPSREEMTKNQVSLTCLVKGFYPSDIAVEWESNGQPENNYKTTPPVLDSDGSFFLYSKLTVDKSRWQQGNVFSCSVMHEALHNHYTQKSLSLSPGK

SEQ ID NO: 1715 - protein, 214 aa, synthetic construct
  REGION 1..214: note = IgG1 Light Chain
DIQMTQSPSSLSASVGDRVTITCRASQTINDWLAWYQQKPGKAPKLLIYSASTLHSGVPSRFSGSGSGTDFTLTISSLQPEDFATYYCQQAYSTPWTFGQGTKVEIKRTVAAPSVFIFPPSDEQLKSGTASVVCLLNNFYPREAKVQWKVDNALQSGNSQESVTEQDSKDSTYSLSSTLTLSKADYEKHKVYACEVTHQGLSSPVTKSFNRGEC

SEQ ID NO: 1716 - protein, 214 aa, synthetic construct
  REGION 1..214: note = IgG1 Light Chain
DIQMTQSPSSLSASVGDRVTITCRASQSISRYLNWYQQKPGKAPKLLIYTASTLQSGVPSRFSGSGSGTDFTLTISSLQPEDFATYYCQQYDDLPLTFGGGTKVEIKRTVAAPSVFIFPPSDEQLKSGTASVVCLLNNFYPREAKVQWKVDNALQSGNSQESVTEQDSKDSTYSLSSTLTLSKADYEKHKVYACEVTHQGLSSPVTKSFNRGEC

SEQ ID NO: 1717 - protein, 214 aa, synthetic construct
  REGION 1..214: note = IgG1 Light Chain
DIQMTQSPSSLSASVGDRVTITCRASQSISSYLNWYQQKPGKAPKLLIYGASTLHSGVPSRFSGSGSGTDFTLTISSLQPEDFATYYCQQSYRIPYTFGQGTKLEIKRTVAAPSVFIFPPSDEQLKSGTASVVCLLNNFYPREAKVQWKVDNALQSGNSQESVTEQDSKDSTYSLSSTLTLSKADYEKHKVYACEVTHQGLSSPVTKSFNRGEC

SEQ ID NO: 1718 - protein, 214 aa, synthetic construct
  REGION 1..214: note = IgG1 Light Chain
EIVMTQSPATLSVSPGERATLSCRASQNINSDLAWYQQKPGQAPRLLIYGASTRATGIPARFSGSGSGTEFTLTISSLQSEDFAVYYCQQYDSLPFTFGPGTKVDIKRTVAAPSVFIFPPSDEQLKSGTASVVCLLNNFYPREAKVQWKVDNALQSGNSQESVTEQDSKDSTYSLSSTLTLSKADYEKHKVYACEVTHQGLSSPVTKSFNRGEC

SEQ ID NO: 1719 - protein, 219 aa, synthetic construct
  REGION 1..219: note = IgG1 Light Chain
DIVMTQSPLSLPVTPGEPASISCRSSQSLLHSNGYNYLDWYLQKPGQSPQLLIYLGSDRASGVPDRFSGSGSGTDFTLKISRVEAEDVGVYYCMQGLQTPITFGQGTRLEIKRTVAAPSVFIFPPSDEQLKSGTASVVCLLNNFYPREAKVQWKVDNALQSGNSQESVTEQDSKDSTYSLSSTLTLSKADYEKHKVYACEVTHQGLSSPVTKSFNRGEC

SEQ ID NO: 1720 - protein, 214 aa, synthetic construct
  REGION 1..214: note = IgG1 Light Chain
DIQMTQSPSSLSASVGDRVTITCRASQSISSYLNWYQQKPGKAPKLLIYEASTLETGVPSRFSGSGSGTDFTLTISSLQPEDFATYYCQQANSFPFTFGPGTKVDIKRTVAAPSVFIFPPSDEQLKSGTASVVCLLNNFYPREAKVQWKVDNALQSGNSQESVTEQDSKDSTYSLSSTLTLSKADYEKHKVYACEVTHQGLSSPVTKSFNRGEC

SEQ ID NO: 1721 - protein, 214 aa, synthetic construct
  REGION 1..214: note = IgG1 Light Chain
DIQMTQSPSSLSASVGDRVTITCRASRGINNWLTWYQQKPGKAPKLLIYGASSLQSGVPSRFSGSGSGTDFTLTISSLQPEDFATYYCQQSYRIPYTFGQGTKLEIKRTVAAPSVFIFPPSDEQLKSGTASVVCLLNNFYPREAKVQWKVDNALQSGNSQESVTEQDSKDSTYSLSSTLTLSKADYEKHKVYACEVTHQGLSSPVTKSFNRGEC

SEQ ID NO: 1722 - protein, 214 aa, synthetic construct
  REGION 1..214: note = IgG1 Light Chain
DIQMTQSPSSLSASVGDRVTITCRASQSVSSFLNWYQQKPGKAPKLLIYAASSLQSGVPSRFSGSGSGTDFTLTISSLQPEDFATYYCQQSYTTPLTFGQGTKVEIKRTVAAPSVFIFPPSDEQLKSGTASVVCLLNNFYPREAKVQWKVDNALQSGNSQESVTEQDSKDSTYSLSSTLTLSKADYEKHKVYACEVTHQGLSSPVTKSFNRGEC

SEQ ID NO: 1723 - protein, 214 aa, synthetic construct
  REGION 1..214: note = IgG1 Light Chain
DIQMTQSPSSLSASVGDRVTITCRSSRNISHWLAWYQQKPGKAPKLLIYKASSLESGVPSRFSGSGSGTDFTLTISSLQPEDFATYYCQQAISFPLTFGGGTKVEIKRTVAAPSVFIFPPSDEQLKSGTASVVCLLNNFYPREAKVQWKVDNALQSGNSQESVTEQDSKDSTYSLSSTLTLSKADYEKHKVYACEVTHQGLSSPVTKSFNRGEC

SEQ ID NO: 1724 - protein, 220 aa, synthetic construct
  REGION 1..220: note = IgG1 Light Chain
DIVMTQSPDSLAVSLGERATINCKSSQSVLHSSKNKNYLAWYQQKPGQPPKLLIYWASTRESGVPDRFSGSGSGTDFTLTISSLQAEDVAVYYCQQYFTTPPTFGPGTKVDIKRTVAAPSVFIFPPSDEQLKSGTASVVCLLNNFYPREAKVQWKVDNALQSGNSQESVTEQDSKDSTYSLSSTLTLSKADYEKHKVYACEVTHQGLSSPVTKSFNRGEC

SEQ ID NO: 1725 - protein, 214 aa, synthetic construct
  REGION 1..214: note = IgG1 Light Chain
DIQMTQSPSSLSASVGDRVTITCRASQSLGSWLAWYQQKPGKAPKLLIYAASSLQSGVPSRFSGSGSGTDFTLTISSLQPEDFATYYCQQANSFPLTFGQGTKVEIKRTVAAPSVFIFPPSDEQLKSGTASVVCLLNNFYPREAKVQWKVDNALQSGNSQESVTEQDSKDSTYSLSSTLTLSKADYEKHKVYACEVTHQGLSSPVTKSFNRGEC

SEQ ID NO: 1726 - protein, 214 aa, synthetic construct
  REGION 1..214: note = IgG1 Light Chain
DIQMTQSPSSLSASVGDRVTITCQASQDIDNYLNWYQQKPGKAPKLLIYDASNLETGVPSRFSGSGSGTDFTLTISSLQPEDFATYYCQQSYSTPLTFGGGTKLEIKRTVAAPSVFIFPPSDEQLKSGTASVVCLLNNFYPREAKVQWKVDNALQSGNSQESVTEQDSKDSTYSLSSTLTLSKADYEKHKVYACEVTHQGLSSPVTKSFNRGEC

SEQ ID NO: 1727 - protein, 214 aa, synthetic construct
  REGION 1..214: note = IgG1 Light Chain
DIQMTQSPSSLSASVGDRVTITCRASQGIRNWLAWYQQKPGKAPKLLIYAASSLQSGVPSRFSGSGSGTDFTLTISSLQPEDFATYYCQQSYRTPYTFGQGTKLEIKRTVAAPSVFIFPPSDEQLKSGTASVVCLLNNFYPREAKVQWKVDNALQSGNSQESVTEQDSKDSTYSLSSTLTLSKADYEKHKVYACEVTHQGLSSPVTKSFNRGEC

SEQ ID NO: 1728 - protein, 220 aa, synthetic construct
  REGION 1..220: note = IgG1 Light Chain
DIVMTQSPDSLAVSLGERATINCKSSQSVLYSSNNKNYLAWYQQKPGQPPKLLIYWASTRESGVPDRFSGSGSGTDFTLTISSLQAEDVAVYYCQQYYTTPLTFGQGTKLEIKRTVAAPSVFIFPPSDEQLKSGTASVVCLLNNFYPREAKVQWKVDNALQSGNSQESVTEQDSKDSTYSLSSTLTLSKADYEKHKVYACEVTHQGLSSPVTKSFNRGEC

SEQ ID NO: 1729 - protein, 219 aa, synthetic construct
  REGION 1..219: note = IgG1 Light Chain
DIVMTQSPLSLPVTPGEPASISCRSSQSLLHSNGYNYLDWYLQKPGQSPQLLIYLASNRASGVPDRFSGSGSGTDFTLKISRVEAEDVGVYYCKQTSHIPLTFGQGTKVEIKRTVAAPSVFIFPPSDEQLKSGTASVVCLLNNFYPREAKVQWKVDNALQSGNSQESVTEQDSKDSTYSLSSTLTLSKADYEKHKVYACEVTHQGLSSPVTKSFNRGEC

SEQ ID NO: 1730 - protein, 219 aa, synthetic construct
  REGION 1..219: note = IgG1 Light Chain
DIVMTQSPLSLPVTPGEPASISCRSSQSLLHSNGYNYLDWYLQKPGQSPQLLIYSASNLQSGVPDRFSGSGSGTDFTLKISRVEAEDVGVYYCMQALQTPPTFGQGTKLEIKRTVAAPSVFIFPPSDEQLKSGTASVVCLLNNFYPREAKVQWKVDNALQSGNSQESVTEQDSKDSTYSLSSTLTLSKADYEKHKVYACEVTHQGLSSPVTKSFNRGEC

SEQ ID NO: 1731 - protein, 214 aa, synthetic construct
  REGION 1..214: note = IgG1 Light Chain
DIQMTQSPSSLSASVGDRVTITCRASQGISNNLNWYQQKPGKAPKLLIYESSTLETGVPSRFSGSGSGTDFTLTISSLQPEDFATYYCQQSYSAPLTFGGGTKVEIKRTVAAPSVFIFPPSDEQLKSGTASVVCLLNNFYPREAKVQWKVDNALQSGNSQESVTEQDSKDSTYSLSSTLTLSKADYEKHKVYACEVTHQGLSSPVTKSFNRGEC

SEQ ID NO: 1732 - protein, 219 aa, synthetic construct
  REGION 1..219: note = IgG1 Light Chain
DIVMTQSPLSLPVTPGEPASISCRSSQSLLHSNGYNYLDWYLQKPGQSPQLLIYLGSNRASGVPDRFSGSGSGTDFTLKISRVEAEDVGVYYCMQTLRTPLTFGGGTKVEIKRTVAAPSVFIFPPSDEQLKSGTASVVCLLNNFYPREAKVQWKVDNALQSGNSQESVTEQDSKDSTYSLSSTLTLSKADYEKHKVYACEVTHQGLSSPVTKSFNRGEC

SEQ ID NO: 1733 - protein, 214 aa, synthetic construct
  REGION 1..214: note = IgG1 Light Chain
DIQMTQSPSSLSASVGDRVTITCRASQNIGPWLAWYQQKPGKAPKLLIYDAKDLHPGVPSRFSGSGSGTDFTLTISSLQPEDFATYYCQQANTFPMTFGQGTRLEIKRTVAAPSVFIFPPSDEQLKSGTASVVCLLNNFYPREAKVQWKVDNALQSGNSQESVTEQDSKDSTYSLSSTLTLSKADYEKHKVYACEVTHQGLSSPVTKSFNRGEC

SEQ ID NO: 1734 - protein, 214 aa, synthetic construct
  REGION 1..214: note = IgG1 Light Chain
DIQMTQSPSSLSASVGDRVTITCRASQSIDRWLAWYQQKPGKAPKLLIYGASSLQSGVPSRFSGSGSGTDFTLTISSLQPEDFATYYCQQSYSTPWTFGQGTRLEIKRTVAAPSVFIFPPSDEQLKSGTASVVCLLNNFYPREAKVQWKVDNALQSGNSQESVTEQDSKDSTYSLSSTLTLSKADYEKHKVYACEVTHQGLSSPVTKSFNRGEC

SEQ ID NO: 1735 - protein, 214 aa, synthetic construct
  REGION 1..214: note = IgG1 Light Chain
DIQMTQSPSSLSASVGDRVTITCQASQDISNNLNWYQQKPGKAPKLLIYAASGLQSGVPSRFSGSGSGTDFTLTISSLQPEDFATYYCQQANSFPLTFGGGTKVEIKRTVAAPSVFIFPPSDEQLKSGTASVVCLLNNFYPREAKVQWKVDNALQSGNSQESVTEQDSKDSTYSLSSTLTLSKADYEKHKVYACEVTHQGLSSPVTKSFNRGEC

SEQ ID NO: 1736 - protein, 214 aa, synthetic construct
  REGION 1..214: note = IgG1 Light Chain
DIQMTQSPSSLSASVGDRVTITCRASRSIRTWLAWYQQKPGKAPKLLIYAASSLQTGVPSRFSGSGSGTDFTLTISSLQPEDFATYYCQQSYSTPYTFGQGTKLEIKRTVAAPSVFIFPPSDEQLKSGTASVVCLLNNFYPREAKVQWKVDNALQSGNSQESVTEQDSKDSTYSLSSTLTLSKADYEKHKVYACEVTHQGLSSPVTKSFNRGEC

SEQ ID NO: 1737 - protein, 214 aa, synthetic construct
  REGION 1..214: note = IgG1 Light Chain
DIQMTQSPSSLSASVGDRVTITCRASQGINNWLAWYQQKPGKAPKLLIYDASNLETGVPSRFSGSGSGTDFTLTISSLQPEDFATYYCQQANSFPPTFGQGTKLEIKRTVAAPSVFIFPPSDEQLKSGTASVVCLLNNFYPREAKVQWKVDNALQSGNSQESVTEQDSKDSTYSLSSTLTLSKADYEKHKVYACEVTHQGLSSPVTKSFNRGEC

SEQ ID NO: 1738 - protein, 219 aa, synthetic construct
  REGION 1..219: note = IgG1 Light Chain
DIVMTQSPLSLPVTPGEPASISCRSSQSLLHSNGYNYLDWYLQKPGQSPQLLIYDATNLPTGVPDRFSGSGSGTDFTLKISRVEAEDVGVYYCMQALQTPFTFGQGTKLEIKRTVAAPSVFIFPPSDEQLKSGTASVVCLLNNFYPREAKVQWKVDNALQSGNSQESVTEQDSKDSTYSLSSTLTLSKADYEKHKVYACEVTHQGLSSPVTKSFNRGEC

SEQ ID NO: 1739 - protein, 214 aa, synthetic construct
  REGION 1..214: note = IgG1 Light Chain
DIQMTQSPSSLSASVGDRVTITCRASQSINDWLAWYQQKPGKAPKLLIYAASNLQSGVPSRFSGSGSGTDFTLTISSLQPEDFATYYCQQGYSTPPTFGQGTKVEIKRTVAAPSVFIFPPSDEQLKSGTASVVCLLNNFYPREAKVQWKVDNALQSGNSQESVTEQDSKDSTYSLSSTLTLSKADYEKHKVYACEVTHQGLSSPVTKSFNRGEC

SEQ ID NO: 1740 - protein, 214 aa, synthetic construct
  REGION 1..214: note = IgG1 Light Chain
DIQMTQSPSSLSASVGDRVTITCQASQDIRNYLNWYQQKPGKAPKLLIYAASSLQSGVPSRFSGSGSGTDFTLTISSLQPEDFATYYCQQTSSTPLTFGPGTKVDIKRTVAAPSVFIFPPSDEQLKSGTASVVCLLNNFYPREAKVQWKVDNALQSGNSQESVTEQDSKDSTYSLSSTLTLSKADYEKHKVYACEVTHQGLSSPVTKSFNRGEC

SEQ ID NO: 1741 - protein, 214 aa, synthetic construct
  REGION 1..214: note = IgG1 Light Chain
DIQMTQSPSSLSASVGDRVTITCRASQDIRNNLGWYQQKPGKAPKLLIYGASSLQSGVPSRFSGSGSGTDFTLTISSLQPEDFATYYCQQTYSSPPTFGQGTKLEIKRTVAAPSVFIFPPSDEQLKSGTASVVCLLNNFYPREAKVQWKVDNALQSGNSQESVTEQDSKDSTYSLSSTLTLSKADYEKHKVYACEVTHQGLSSPVTKSFNRGEC

SEQ ID NO: 1742 - protein, 214 aa, synthetic construct
  REGION 1..214: note = IgG1 Light Chain
DIQMTQSPSSLSASVGDRVTITCRASQGIDNYLAWYQQKPGKAPKLLIYQASTLESGVPSRFSGSGSGTDFTLTISSLQPEDFATYYCQQSYSIPWTFGQGTKVEIKRTVAAPSVFIFPPSDEQLKSGTASVVCLLNNFYPREAKVQWKVDNALQSGNSQESVTEQDSKDSTYSLSSTLTLSKADYEKHKVYACEVTHQGLSSPVTKSFNRGEC

SEQ ID NO: 1743 - protein, 214 aa, synthetic construct
  REGION 1..214: note = IgG1 Light Chain
DIQMTQSPSSLSASVGDRVTITCRASQSISRWLAWYQQKPGKAPKLLIYDASNLETGVPSRFSGSGSGTDFTLTISSLQPEDFATYYCQQGNSFPPIFGGGTKVEIKRTVAAPSVFIFPPSDEQLKSGTASVVCLLNNFYPREAKVQWKVDNALQSGNSQESVTEQDSKDSTYSLSSTLTLSKADYEKHKVYACEVTHQGLSSPVTKSFNRGEC

SEQ ID NO: 1744 - protein, 214 aa, synthetic construct
  REGION 1..214: note = IgG1 Light Chain
DIQMTQSPSSLSASVGDRVTITCRASQSISSWLAWYQQKPGKAPKLLIYGASSLQSGVPSRFSGSGSGTDFTLTISSLQPEDFATYYCQQTYRTPLTFGPGTKVDIKRTVAAPSVFIFPPSDEQLKSGTASVVCLLNNFYPREAKVQWKVDNALQSGNSQESVTEQDSKDSTYSLSSTLTLSKADYEKHKVYACEVTHQGLSSPVTKSFNRGEC

SEQ ID NO: 1745 - protein, 214 aa, synthetic construct
  REGION 1..214: note = IgG1 Light Chain
DIQMTQSPSSLSASVGDRVTITCRASQGIGNDLGWYQQKPGKAPKLLIYGASSVQSGVPSRFSGSGSGTDFTLTISSLQPEDFATYYCQQSYSTPITFGQGTRLEIKRTVAAPSVFIFPPSDEQLKSGTASVVCLLNNFYPREAKVQWKVDNALQSGNSQESVTEQDSKDSTYSLSSTLTLSKADYEKHKVYACEVTHQGLSSPVTKSFNRGEC

SEQ ID NO: 1746 - protein, 215 aa, synthetic construct
  REGION 1..215: note = IgG1 Light Chain
EIVMTQSPATLSVSPGERATLSCRASQSVSSSYLAWYQQKPGQAPRLLIYATSTRATGIPARFSGSGSGTEFTLTISSLQSEDFAVYYCQQYGSLPLTFGQGTKVEIKRTVAAPSVFIFPPSDEQLKSGTASVVCLLNNFYPREAKVQWKVDNALQSGNSQESVTEQDSKDSTYSLSSTLTLSKADYEKHKVYACEVTHQGLSSPVTKSFNRGEC

SEQ ID NO: 1747 - protein, 214 aa, synthetic construct
  REGION 1..214: note = IgG1 Light Chain
DIQMTQSPSSLSASVGDRVTITCRASQGISNNLNWYQQKPGKAPKLLIYDASNLETGVPSRFSGSGSGTDFTLTISSLQPEDFATYYCQQANSFPLTFGPGTKVDIKRTVAAPSVFIFPPSDEQLKSGTASVVCLLNNFYPREAKVQWKVDNALQSGNSQESVTEQDSKDSTYSLSSTLTLSKADYEKHKVYACEVTHQGLSSPVTKSFNRGEC

SEQ ID NO: 1748 - protein, 214 aa, synthetic construct
  REGION 1..214: note = IgG1 Light Chain
DIQMTQSPSSLSASVGDRVTITCRASQGIRNDLAWYQQKPGKAPKLLIYAASTLQNGVPSRFSGSGSGTDFTLTISSLQPEDFATYYCQQSYSTPWTFGQGTKVEIKRTVAAPSVFIFPPSDEQLKSGTASVVCLLNNFYPREAKVQWKVDNALQSGNSQESVTEQDSKDSTYSLSSTLTLSKADYEKHKVYACEVTHQGLSSPVTKSFNRGEC

SEQ ID NO: 1749 - protein, 214 aa, synthetic construct; identical to SEQ ID NO: 1748
  REGION 1..214: note = IgG1 Light Chain

SEQ ID NO: 1750 - protein, 214 aa, synthetic construct
  REGION 1..214: note = IgG1 Light Chain
DIQMTQSPSSLSASVGDRVTITCQASQGINNYLNWYQQKPGKAPKLLIYAASTLQRGVPSRFSGSGSGTDFTLTISSLQPEDFATYYCQQSYQTPLTFGGGTKVEIKRTVAAPSVFIFPPSDEQLKSGTASVVCLLNNFYPREAKVQWKVDNALQSGNSQESVTEQDSKDSTYSLSSTLTLSKADYEKHKVYACEVTHQGLSSPVTKSFNRGEC

SEQ ID NO: 1751 - protein, 214 aa, synthetic construct
  REGION 1..214: note = IgG1 Light Chain
DIQMTQSPSSLSASVGDRVTITCRASQSISSYLNWYQQKPGKAPKLLIYAASSLQSGVPSRFSGSGSGTDFTLTISSLQPEDFATYYCQQSYSTPLTFGGGTKVEIKRTVAAPSVFIFPPSDEQLKSGTASVVCLLNNFYPREAKVQWKVDNALQSGNSQESVTEQDSKDSTYSLSSTLTLSKADYEKHKVYACEVTHQGLSSPVTKSFNRGEC

SEQ ID NO: 1752 - protein, 214 aa, synthetic construct
  REGION 1..214: note = IgG1 Light Chain
DIQMTQSPSSLSASVGDRVTITCRASQGISNYLAWYQQKPGKAPKLLIYTASTLQSGVPSRFSGSGSGTDFTLTISSLQPEDFATYYCQQSYSTPLTFGGGTKVEIKRTVAAPSVFIFPPSDEQLKSGTASVVCLLNNFYPREAKVQWKVDNALQSGNSQESVTEQDSKDSTYSLSSTLTLSKADYEKHKVYACEVTHQGLSSPVTKSFNRGEC

SEQ ID NO: 1753 - protein, 214 aa, synthetic construct
  REGION 1..214: note = IgG1 Light Chain
DIQMTQSPSSLSASVGDRVTITCRASQGISNDLAWYQQKPGKAPKLLIYGASNLETGVPSRFSGSGSGTDFTLTISSLQPEDFATYYCQQANSFPFTFGPGTKVDIKRTVAAPSVFIFPPSDEQLKSGTASVVCLLNNFYPREAKVQWKVDNALQSGNSQESVTEQDSKDSTYSLSSTLTLSKADYEKHKVYACEVTHQGLSSPVTKSFNRGEC

SEQ ID NO: 1754 - protein, 214 aa, synthetic construct
  REGION 1..214: note = IgG1 Light Chain
DIQMTQSPSSLSASVGDRVTITCRVSQGISSYLNWYQQKPGKAPKLLIYEASTLESGVPSRFSGSGSGTDFTLTISSLQPEDFATYYCQQGYSTPPTFGQGTKVEIKRTVAAPSVFIFPPSDEQLKSGTASVVCLLNNFYPREAKVQWKVDNALQSGNSQESVTEQDSKDSTYSLSSTLTLSKADYEKHKVYACEVTHQGLSSPVTKSFNRGEC

SEQ ID NO: 1755 - protein, 219 aa, synthetic construct
  REGION 1..219: note = IgG1 Light Chain
DIVMTQSPLSLPVTPGEPASISCRSSQSLLQSNGYNYLDWYLQKPGQSPQLLIYLGSNRASGVPDRFSGSGSGTDFTLKISRVEAEDVGVYYCMQSTHWPLTFGQGTRLEIKRTVAAPSVFIFPPSDEQLKSGTASVVCLLNNFYPREAKVQWKVDNALQSGNSQESVTEQDSKDSTYSLSSTLTLSKADYEKHKVYACEVTHQGLSSPVTKSFNRGEC

SEQ ID NO: 1756 - protein, 214 aa, synthetic construct
  REGION 1..214: note = IgG1 Light Chain
DIQMTQSPSSLSASVGDRVTITCRASQGISNNLNWYQQKPGKAPKLLIYAASSLQSGVPSRFSGSGSGTDFTLTISSLQPEDFATYYCQQSYSTPPTFGQGTKLEIKRTVAAPSVFIFPPSDEQLKSGTASVVCLLNNFYPREAKVQWKVDNALQSGNSQESVTEQDSKDSTYSLSSTLTLSKADYEKHKVYACEVTHQGLSSPVTKSFNRGEC

SEQ ID NO: 1757 - protein, 215 aa, synthetic construct
  REGION 1..215: note = IgG1 Light Chain
DIQMTQSPSSLSASVGDRVTITCRASQSISTYLNWYQQKPGKAPKLLIYDASNLETGVPSRFSGSGSGTDFTLTISSLQPEDFATYYCQQSYSTPVLTFGGGTKVEIKRTVAAPSVFIFPPSDEQLKSGTASVVCLLNNFYPREAKVQWKVDNALQSGNSQESVTEQDSKDSTYSLSSTLTLSKADYEKHKVYACEVTHQGLSSPVTKSFNRGEC

SEQ ID NO: 1758 - protein, 219 aa, synthetic construct
  REGION 1..219: note = IgG1 Light Chain
DIVMTQSPLSLPVTPGEPASISCRSSQSLLHSNGYNYLDWYLQKPGQSPQLLIYLGSNRASGVPDRFSGSGSGTDFTLKISRVEAEDVGVYYCMQALQPPPTFGQGTRLEIKRTVAAPSVFIFPPSDEQLKSGTASVVCLLNNFYPREAKVQWKVDNALQSGNSQESVTEQDSKDSTYSLSSTLTLSKADYEKHKVYACEVTHQGLSSPVTKSFNRGEC

SEQ ID NO: 1759 - protein, 214 aa, synthetic construct
  REGION 1..214: note = IgG1 Light Chain
DIQMTQSPSSLSASVGDRVTITCQASQDIDIYLNWYQQKPGKAPKLLIYAASTLESGVPSRFSGSGSGTDFTLTISSLQPEDFATYYCQQSYSTPPTFGGGTKVEIKRTVAAPSVFIFPPSDEQLKSGTASVVCLLNNFYPREAKVQWKVDNALQSGNSQESVTEQDSKDSTYSLSSTLTLSKADYEKHKVYACEVTHQGLSSPVTKSFNRGEC

SEQ ID NO: 1760 - protein, 214 aa, synthetic construct
  REGION 1..214: note = IgG1 Light Chain
DIQMTQSPSSLSASVGDRVTITCRASQSISTYLNWYQQKPGKAPKLLIYDASNLETGVPSRFSGSGSGTDFTLTISSLQPEDFATYYCQQANSFPPTFGGGTKVEIKRTVAAPSVFIFPPSDEQLKSGTASVVCLLNNFYPREAKVQWKVDNALQSGNSQESVTEQDSKDSTYSLSSTLTLSKADYEKHKVYACEVTHQGLSSPVTKSFNRGEC

SEQ ID NO: 1761 - protein, 219 aa, synthetic construct
  REGION 1..219: note = IgG1 Light Chain
DIVMTQSPLSLPVTPGEPASISCRSSQSLLHSNGYNYLDWYLQKPGQSPQLLIYAASSLQSGVPDRFSGSGSGTDFTLKISRVEAEDVGVYYCMQGIQWPWTFGQGTKVEIKRTVAAPSVFIFPPSDEQLKSGTASVVCLLNNFYPREAKVQWKVDNALQSGNSQESVTEQDSKDSTYSLSSTLTLSKADYEKHKVYACEVTHQGLSSPVTKSFNRGEC

SEQ ID NO: 1762 - protein, 214 aa, synthetic construct
  REGION 1..214: note = IgG1 Light Chain
DIQMTQSPSSLSASVGDRVTITCRASQSISTYVNWYQQKPGKAPKLLIYAASSLQSGVPSRFSGSGSGTDFTLTISSLQPEDFATYYCQQDYSYPYTFGQGTKVEIKRTVAAPSVFIFPPSDEQLKSGTASVVCLLNNFYPREAKVQWKVDNALQSGNSQESVTEQDSKDSTYSLSSTLTLSKADYEKHKVYACEVTHQGLSSPVTKSFNRGEC

SEQ ID NO: 1763 - protein, 214 aa, synthetic construct
  REGION 1..214: note = IgG1 Light Chain
DIQMTQSPSSLSASVGDRVTITCRASQSISTWLAWYQQKPGKAPKLLIYAASTLQSGVPSRFSGSGSGTDFTLTISSLQPEDFATYYCLQDYSYPPTFGQGTKVEIKRTVAAPSVFIFPPSDEQLKSGTASVVCLLNNFYPREAKVQWKVDNALQSGNSQESVTEQDSKDSTYSLSSTLTLSKADYEKHKVYACEVTHQGLSSPVTKSFNRGEC

SEQ ID NO: 1764 - protein, 214 aa, synthetic construct
  REGION 1..214: note = IgG1 Light Chain
DIQMTQSPSSLSASVGDRVTITCRASQSISSWLAWYQQKPGKAPKLLIYAASSLQSGVPSRFSGSGSGTDFTLTISSLQPEDFATYYCQQSYDIPLTFGGGTKVEIKRTVAAPSVFIFPPSDEQLKSGTASVVCLLNNFYPREAKVQWKVDNALQSGNSQESVTEQDSKDSTYSLSSTLTLSKADYEKHKVYACEVTHQGLSSPVTKSFNRGEC

SEQ ID NO: 1765 - protein, 214 aa, synthetic construct
  REGION 1..214: note = IgG1 Light Chain
DIQMTQSPSSLSASVGDRVTITCQASQDISNLLNWYQQKPGKAPKLLIYAASTLQSGVPSRFSGSGSGTDFTLTISSLQPEDFATYYCQQSYNTPWTFGPGTKVDIKRTVAAPSVFIFPPSDEQLKSGTASVVCLLNNFYPREAKVQWKVDNALQSGNSQESVTEQDSKDSTYSLSSTLTLSKADYEKHKVYACEVTHQGLSSPVTKSFNRGEC

SEQ ID NO: 1766 - protein, 214 aa, synthetic construct
  REGION 1..214: note = IgG1 Light Chain
DIQMTQSPSSLSASVGDRVTITCQASQDIHNYLNWYQQKPGKAPKLLIYQASSLESGVPSRFSGSGSGTDFTLTISSLQPEDFATYYCQQANSFPLTFGGGTKLEIKRTVAAPSVFIFPPSDEQLKSGTASVVCLLNNFYPREAKVQWKVDNALQSGNSQESVTEQDSKDSTYSLSSTLTLSKADYEKHKVYACEVTHQGLSSPVTKSFNRGEC

SEQ ID NO: 1767 - protein, 214 aa, synthetic construct
  REGION 1..214: note = IgG1 Light Chain
DIQMTQSPSSLSASVGDRVTITCRASQNIGSWLAWYQQKPGKAPKLLIYGASILQSGVPSRFSGSGSGTDFTLTISSLQPEDFATYYCQQANSFPLTFGGGTKLEIKRTVAAPSVFIFPPSDEQLKSGTASVVCLLNNFYPREAKVQWKVDNALQSGNSQESVTEQDSKDSTYSLSSTLTLSKADYEKHKVYACEVTHQGLSSPVTKSFNRGEC

SEQ ID NO: 1768 - protein, 214 aa, synthetic construct
  REGION 1..214: note = IgG1 Light Chain
DIQMTQSPSSLSASVGDRVTITCRASQGIGNWLAWYQQKPGKAPKLLIYEASTLQSGVPSRFSGSGSGTDFTLTISSLQPEDFATYYCHQYNAYPWTFGQGTKVEIKRTVAAPSVFIFPPSDEQLKSGTASVVCLLNNFYPREAKVQWKVDNALQSGNSQESVTEQDSKDSTYSLSSTLTLSKADYEKHKVYACEVTHQGLSSPVTKSFNRGEC

SEQ ID NO: 1769 - protein, 214 aa, synthetic construct
  REGION 1..214: note = IgG1 Light Chain
DIQMTQSPSSLSASVGDRVTITCQASQDISNYLNWYQQKPGKAPKLLIYAASSLQSGVPSRFSGSGSGTDFTLTISSLQPEDFATYYCQQYNSYPLTFGQGTKLEIKRTVAAPSVFIFPPSDEQLKSGTASVVCLLNNFYPREAKVQWKVDNALQSGNSQESVTEQDSKDSTYSLSSTLTLSKADYEKHKVYACEVTHQGLSSPVTKSFNRGEC

SEQ ID NO: 1770 - protein, 214 aa, synthetic construct
  REGION 1..214: note = IgG1 Light Chain
DIQMTQSPSSLSASVGDRVTITCRASHSISSWLAWYQQKPGKAPKLLIYDASNLETGVPSRFSGSGSGTDFTLTISSLQPEDFATYYCQQADSFPLTFGGGTKVEIKRTVAAPSVFIFPPSDEQLKSGTASVVCLLNNFYPREAKVQWKVDNALQSGNSQESVTEQDSKDSTYSLSSTLTLSKADYEKHKVYACEVTHQGLSSPVTKSFNRGEC

SEQ ID NO: 1771 - protein, 214 aa, synthetic construct
  REGION 1..214: note = IgG1 Light Chain
DIQMTQSPSSLSASVGDRVTITCQASQDINDYLNWYQQKPGKAPKLLIYGASNLQSGVPSRFSGSGSGTDFTLTISSLQPEDFATYYCLQHNSYPLTFGQGTKLEIKRTVAAPSVFIFPPSDEQLKSGTASVVCLLNNFYPREAKVQWKVDNALQSGNSQESVTEQDSKDSTYSLSSTLTLSKADYEKHKVYACEVTHQGLSSPVTKSFNRGEC

SEQ ID NO: 1772 - protein, 214 aa, synthetic construct
  REGION 1..214: note = IgG1 Light Chain
DIQMTQSPSSLSASVGDRVTITCRASQGISNYLAWYQQKPGKAPKLLIYDASNLETGVPSRFSGSGSGTDFTLTISSLQPEDFATYYCQQSYNVPPTFGQGTKVEIKRTVAAPSVFIFPPSDEQLKSGTASVVCLLNNFYPREAKVQWKVDNALQSGNSQESVTEQDSKDSTYSLSSTLTLSKADYEKHKVYACEVTHQGLSSPVTKSFNRGEC

SEQ ID NO: 1773 - protein, 214 aa, synthetic construct
  REGION 1..214: note = IgG1 Light Chain
DIQMTQSPSSLSASVGDRVTITCRASQSISSYLNWYQQKPGKAPKLLIYDASNLETGVPSRFSGSGSGTDFTLTISSLQPEDFATYYCQQANSFPLTFGQGTKVEIKRTVAAPSVFIFPPSDEQLKSGTASVVCLLNNFYPREAKVQWKVDNALQSGNSQESVTEQDSKDSTYSLSSTLTLSKADYEKHKVYACEVTHQGLSSPVTKSFNRGEC

SEQ ID NO: 1774 - protein, 214 aa, synthetic construct
  REGION 1..214: note = IgG1 Light Chain
EIVMTQSPATLSVSPGERATLSCRASQSIGTYLAWYQQKPGQAPRLLIYDASSRATGIPARFSGSGSGTEFTLTISSLQSEDFAVYYCQQYKSYPLTFGGGTKVEIKRTVAAPSVFIFPPSDEQLKSGTASVVCLLNNFYPREAKVQWKVDNALQSGNSQESVTEQDSKDSTYSLSSTLTLSKADYEKHKVYACEVTHQGLSSPVTKSFNRGEC

SEQ ID NO: 1775 - protein, 214 aa, synthetic construct
  REGION 1..214: note = IgG1 Light Chain
DIQMTQSPSSLSASVGDRVTITCQASQDISNYLNWYQQKPGKAPKLLIYGASSLQSGVPSRFSGSGSGTDFTLTISSLQPEDFATYYCQQHNSYPWTFGQGTKVEIKRTVAAPSVFIFPPSDEQLKSGTASVVCLLNNFYPREAKVQWKVDNALQSGNSQESVTEQDSKDSTYSLSSTLTLSKADYEKHKVYACEVTHQGLSSPVTKSFNRGEC

SEQ ID NO: 1776 - protein, 214 aa, synthetic construct
  REGION 1..214: note = IgG1 Light Chain
DIQMTQSPSSLSASVGDRVTITCRASQGIHNYLAWYQQKPGKAPKLLIYDASNLETGVPSRFSGSGSGTDFTLTISSLQPEDFATYYCQQTSSFPYTFGQGTKLEIKRTVAAPSVFIFPPSDEQLKSGTASVVCLLNNFYPREAKVQWKVDNALQSGNSQESVTEQDSKDSTYSLSSTLTLSKADYEKHKVYACEVTHQGLSSPVTKSFNRGEC

SEQ ID NO: 1777 - protein, 214 aa, synthetic construct
  REGION 1..214: note = IgG1 Light Chain
DIQMTQSPSSLSASVGDRVTITCQASQDISNYLNWYQQKPGKAPKLLIYDASNLQSGVPSRFSGSGSGTDFTLTISSLQPEDFATYYCLQHNSYPLTFGGGTKVEIKRTVAAPSVFIFPPSDEQLKSGTASVVCLLNNFYPREAKVQWKVDNALQSGNSQESVTEQDSKDSTYSLSSTLTLSKADYEKHKVYACEVTHQGLSSPVTKSFNRGEC

SEQ ID NO: 1778 - protein, 219 aa, synthetic construct
  REGION 1..219: note = IgG1 Light Chain
DIVMTQSPLSLPVTPGEPASISCRSSQSLLHSNGYNYLDWYLQKPGQSPQLLIYAASTLQSGVPDRFSGSGSGTDFTLKISRVEAEDVGVYYCMQGTHWPPTFGPGTKVDIKRTVAAPSVFIFPPSDEQLKSGTASVVCLLNNFYPREAKVQWKVDNALQSGNSQESVTEQDSKDSTYSLSSTLTLSKADYEKHKVYACEVTHQGLSSPVTKSFNRGEC

SEQ ID NO: 1779 - protein, 214 aa, synthetic construct
  REGION 1..214: note = IgG1 Light Chain
DIQMTQSPSSLSASVGDRVTITCRASQSIGTYLNWYQQKPGKAPKLLIYAASSLQSGVPSRFSGSGSGTDFTLTISSLQPEDFATYYCQQSYTDPWTFGQGTKVEIKRTVAAPSVFIFPPSDEQLKSGTASVVCLLNNFYPREAKVQWKVDNALQSGNSQESVTEQDSKDSTYSLSSTLTLSKADYEKHKVYACEVTHQGLSSPVTKSFNRGEC

SEQ ID NO: 1780 - protein, 214 aa, synthetic construct
  REGION 1..214: note = IgG1 Light Chain
DIQMTQSPSSLSASVGDRVTITCRASQSIFSYLNWYQQKPGKAPKLLIYSASNLQSGVPSRFSGSGSGTDFTLTISSLQPEDFATYYCQQSYSTPITFGQGTKVEIKRTVAAPSVFIFPPSDEQLKSGTASVVCLLNNFYPREAKVQWKVDNALQSGNSQESVTEQDSKDSTYSLSSTLTLSKADYEKHKVYACEVTHQGLSSPVTKSFNRGEC

SEQ ID NO: 1781 - protein, 214 aa, synthetic construct
  REGION 1..214: note = IgG1 Light Chain
DIQMTQSPSSLSASVGDRVTITCRASQGISSYLAWYQQKPGKAPKLLIYDASNLETGVPSRFSGSGSGTDFTLTISSLQPEDFATYYCQQASGFPYTFGQGTRLEIKRTVAAPSVFIFPPSDEQLKSGTASVVCLLNNFYPREAKVQWKVDNALQSGNSQESVTEQDSKDSTYSLSSTLTLSKADYEKHKVYACEVTHQGLSSPVTKSFNRGEC

SEQ ID NO: 1782 - protein, 214 aa, synthetic construct
  REGION 1..214: note = IgG1 Light Chain
DIQMTQSPSSLSASVGDRVTITCRASQSISNYLNWYQQKPGKAPKLLIYATSSLQSGVPSRFSGSGSGTDFTLTISSLQPEDFATYYCQQGYNIPFTFGQGTKLEIKRTVAAPSVFIFPPSDEQLKSGTASVVCLLNNFYPREAKVQWKVDNALQSGNSQESVTEQDSKDSTYSLSSTLTLSKADYEKHKVYACEVTHQGLSSPVTKSFNRGEC

SEQ ID NO: 1783 - protein, 214 aa, synthetic construct
  REGION 1..214: note = IgG1 Light Chain
DIQMTQSPSSLSASVGDRVTITCRASESISGWLAWYQQKPGKAPKLLIYDASNLETGVPSRFSGSGSGTDFTLTISSLQPEDFATYYCQQYDTWPFTFGPGTKVDIKRTVAAPSVFIFPPSDEQLKSGTASVVCLLNNFYPREAKVQWKVDNALQSGNSQESVTEQDSKDSTYSLSSTLTLSKADYEKHKVYACEVTHQGLSSPVTKSFNRGEC

SEQ ID NO: 1784 - protein, 214 aa, synthetic construct
  REGION 1..214: note = IgG1 Light Chain
DIQMTQSPSSLSASVGDRVTITCQASQSISNWLAWYQQKPGKAPKLLIYAASTLQSGVPSRFSGSGSGTDFTLTISSLQPEDFATYYCQQSYSTPWTFGQGTKVEIKRTVAAPSVFIFPPSDEQLKSGTASVVCLLNNFYPREAKVQWKVDNALQSGNSQESVTEQDSKDSTYSLSSTLTLSKADYEKHKVYACEVTHQGLSSPVTKSFNRGEC

SEQ ID NO: 1785 - protein, 214 aa, synthetic construct
  REGION 1..214: note = IgG1 Light Chain
DIQMTQSPSSLSASVGDRVTITCQASQDISNYLNWYQQKPGKAPKLLIYGASTLQSGVPSRFSGSGSGTDFTLTISSLQPEDFATYYCQQYDSYPPTFGGGTKVEIKRTVAAPSVFIFPPSDEQLKSGTASVVCLLNNFYPREAKVQWKVDNALQSGNSQESVTEQDSKDSTYSLSSTLTLSKADYEKHKVYACEVTHQGLSSPVTKSFNRGEC

SEQ ID NO: 1786 - protein, 214 aa, synthetic construct
  REGION 1..214: note = IgG1 Light Chain
DIQMTQSPSSLSASVGDRVTITCQASEDINKYLNWYQQKPGKAPKLLIYDASNLETGVPSRFSGSGSGTDFTLTISSLQPEDFATYYCQQANSFPLTFGQGTKVEIKRTVAAPSVFIFPPSDEQLKSGTASVVCLLNNFYPREAKVQWKVDNALQSGNSQESVTEQDSKDSTYSLSSTLTLSKADYEKHKVYACEVTHQGLSSPVTKSFNRGEC

SEQ ID NO: 1787 - protein, 214 aa, synthetic construct
  REGION 1..214: note = IgG1 Light Chain
DIQMTQSPSSLSASVGDRVTITCRASQSISTYLNWYQQKPGKAPKLLIYDASNLETGVPSRFSGSGSGTDFTLTISSLQPEDFATYYCQQAHSFPPTFGQGTRLEIKRTVAAPSVFIFPPSDEQLKSGTASVVCLLNNFYPREAKVQWKVDNALQSGNSQESVTEQDSKDSTYSLSSTLTLSKADYEKHKVYACEVTHQGLSSPVTKSFNRGEC

SEQ ID NO: 1788 - protein, 214 aa, synthetic construct
  REGION 1..214: note = IgG1 Light Chain
DIQMTQSPSSLSASVGDRVTITCRASQGISNNLNWYQQKPGKAPKLLIYDASYLETGVPSRFSGSGSGTDFTLTISSLQPEDFATYYCQQSYSAPLTFGQGTKVEIKRTVAAPSVFIFPPSDEQLKSGTASVVCLLNNFYPREAKVQWKVDNALQSGNSQESVTEQDSKDSTYSLSSTLTLSKADYEKHKVYACEVTHQGLSSPVTKSFNRGEC

SEQ ID NO: 1789 - protein, 213 aa, synthetic construct
  REGION 1..213: note = IgG1 Light Chain
EIVMTQSPATLSVSPGERATLSCRASQSVSSYLAWYQQKPGQAPRLLIYDASARATGIPARFSGSGSGTEFTLTISSLQSEDFAVYYCQQYRSSVTFGQGTRLEIKRTVAAPSVFIFPPSDEQLKSGTASVVCLLNNFYPREAKVQWKVDNALQSGNSQESVTEQDSKDSTYSLSSTLTLSKADYEKHKVYACEVTHQGLSSPVTKSFNRGEC

SEQ ID NO: 1790 - protein, 214 aa, synthetic construct
  REGION 1..214: note = IgG1 Light Chain
DIQMTQSPSSLSASVGDRVTITCQASQDINNYLNWYQQKPGKAPKLLIYDASNLETGVPSRFSGSGSGTDFTLTISSLQPEDFATYYCQQANSFPLTFGGGTKVEIKRTVAAPSVFIFPPSDEQLKSGTASVVCLLNNFYPREAKVQWKVDNALQSGNSQESVTEQDSKDSTYSLSSTLTLSKADYEKHKVYACEVTHQGLSSPVTKSFNRGEC

SEQ ID NO: 1791 - protein, 215 aa, synthetic construct
  REGION 1..215: note = IgG1 Light Chain
EIVMTQSPATLSVSPGERATLSCSASQSVGSSYFAWYQQKPGQAPRLLIYDVSTRATGIPARFSGSGSGTEFTLTISSLQSEDFAVYYCQQYYSTPLTFGPGTKVDIKRTVAAPSVFIFPPSDEQLKSGTASVVCLLNNFYPREAKVQWKVDNALQSGNSQESVTEQDSKDSTYSLSSTLTLSKADYEKHKVYACEVTHQGLSSPVTKSFNRGEC

SEQ ID NO: 1792 - protein, 214 aa, synthetic construct
  REGION 1..214: note = IgG1 Light Chain
DIQMTQSPSSLSASVGDRVTITCQASQDISNYLNWYQQKPGKAPKLLIYDASNLETGVPSRFSGSGSGTDFTLTISSLQPEDFATYYCQQSYSIPYTFGQGTKLEIKRTVAAPSVFIFPPSDEQLKSGTASVVCLLNNFYPREAKVQWKVDNALQSGNSQESVTEQDSKDSTYSLSSTLTLSKADYEKHKVYACEVTHQGLSSPVTKSFNRGEC

SEQ ID NO: 1793 - protein, 214 aa, synthetic construct
  REGION 1..214: note = IgG1 Light Chain
DIQMTQSPSSLSASVGDRVTITCRASQGIRNDLGWYQQKPGKAPKLLIYAASSLQPGVPSRFSGSGSGTDFTLTISSLQPEDFATYYCLQTNSFPWTFGQGTKLEIKRTVAAPSVFIFPPSDEQLKSGTASVVCLLNNFYPREAKVQWKVDNALQSGNSQESVTEQDSKDSTYSLSSTLTLSKADYEKHKVYACEVTHQGLSSPVTKSFNRGEC

SEQ ID NO: 1794 - protein, 214 aa, synthetic construct
  REGION 1..214: note = IgG1 Light Chain
DIQMTQSPSSLSASVGDRVTITCRASQSISSWLAWYQQKPGKAPKLLIYDTSSLQSGVPSRFSGSGSGTDFTLTISSLQPEDFATYYCQQGYSTPLTFGQGTKVEIKRTVAAPSVFIFPPSDEQLKSGTASVVCLLNNFYPREAKVQWKVDNALQSGNSQESVTEQDSKDSTYSLSSTLTLSKADYEKHKVYACEVTHQGLSSPVTKSFNRGEC

SEQ ID NO: 1795 - protein, 214 aa, synthetic construct
  REGION 1..214: note = IgG1 Light Chain
DIQMTQSPSSLSASVGDRVTITCQASQDISNYLNWYQQKPGKAPKLLIYGASTLQSGVPSRFSGSGSGTDFTLTISSLQPEDFATYYCQQSYSTPWTFGQGTKLEIKRTVAAPSVFIFPPSDEQLKSGTASVVCLLNNFYPREAKVQWKVDNALQSGNSQESVTEQDSKDSTYSLSSTLTLSKADYEKHKVYACEVTHQGLSSPVTKSFNRGEC

SEQ ID NO: 1796 - protein, 214 aa, synthetic construct
  REGION 1..214: note = IgG1 Light Chain
EIVMTQSPATLSVSPGERATLSCRASQSVSSYLAWYQQKPGQAPRLLIYGASTRATGIPARFSGSGSGTEFTLTISSLQSEDFAVYYCQQYAFSPITFGQGTKLEIKRTVAAPSVFIFPPSDEQLKSGTASVVCLLNNFYPREAKVQWKVDNALQSGNSQESVTEQDSKDSTYSLSSTLTLSKADYEKHKVYACEVTHQGLSSPVTKSFNRGEC

SEQ ID NO: 1797 - protein, 214 aa, synthetic construct
  REGION 1..214: note = IgG1 Light Chain
DIQMTQSPSSLSASVGDRVTITCRVSQGISSYLNWYQQKPGKAPKLLIYDASNLETGVPSRFSGSGSGTDFTLTISSLQPEDFATYYCQQSYSTPLTFGGGTKVEIKRTVAAPSVFIFPPSDEQLKSGTASVVCLLNNFYPREAKVQWKVDNALQSGNSQESVTEQDSKDSTYSLSSTLTLSKADYEKHKVYACEVTHQGLSSPVTKSFNRGEC

SEQ ID NO: 1798 - protein, 214 aa, synthetic construct
  REGION 1..214: note = IgG1 Light Chain
DIQMTQSPSSLSASVGDRVTITCRASQSISSWLAWYQQKPGKAPKLLIYDASNLETGVPSRFSGSGSGTDFTLTISSLQPEDFATYYCLQTHSFPLTFGPGTKVDIKRTVAAPSVFIFPPSDEQLKSGTASVVCLLNNFYPREAKVQWKVDNALQSGNSQESVTEQDSKDSTYSLSSTLTLSKADYEKHKVYACEVTHQGLSSPVTKSFNRGEC

SEQ ID NO: 1799 - protein, 214 aa, synthetic construct
  REGION 1..214: note = IgG1 Light Chain
DIQMTQSPSSLSASVGDRVTITCRASQSVSNWLAWYQQKPGKAPKLLIYDASNLQTGVPSRFSGSGSGTDFTLTISSLQPEDFATYYCQQANSFPLTFGGGTKLEIKRTVAAPSVFIFPPSDEQLKSGTASVVCLLNNFYPREAKVQWKVDNALQSGNSQESVTEQDSKDSTYSLSSTLTLSKADYEKHKVYACEVTHQGLSSPVTKSFNRGEC

SEQ ID NO: 1800 - protein, 219 aa, synthetic construct
  REGION 1..219: note = IgG1 Light Chain
DIVMTQSPLSLPVTPGEPASISCRSSRSLLHSNGYNYLDWYLQKPGQSPQLLIYLGSYRASGVPDRFSGSGSGTDFTLKISRVEAEDVGVYYCMQGTHWPPTFGQGTKLEIKRTVAAPSVFIFPPSDEQLKSGTASVVCLLNNFYPREAKVQWKVDNALQSGNSQESVTEQDSKDSTYSLSSTLTLSKADYEKHKVYACEVTHQGLSSPVTKSFNRGEC

SEQ ID NO: 1801 - protein, 214 aa, synthetic construct
  REGION 1..214: note = IgG1 Light Chain
DIQMTQSPSSLSASVGDRVTITCRASQSISRYLNWYQQKPGKAPKLLIYDASNLETGVPSRFSGSGSGTDFTLTISSLQPEDFATYYCQQSYSTPWTFGQGTKLEIKRTVAAPSVFIFPPSDEQLKSGTASVVCLLNNFYPREAKVQWKVDNALQSGNSQESVTEQDSKDSTYSLSSTLTLSKADYEKHKVYACEVTHQGLSSPVTKSFNRGEC

SEQ ID NO: 1802 - protein, 219 aa, synthetic construct
  REGION 1..219: note = IgG1 Light Chain
DIVMTQSPLSLPVTPGEPASISCRSSRSLLHSNGYNYLDWYLQKPGQSPQLLIYLGSDRASGVPDRFSGSGSGTDFTLKISRVEAEDVGVYYCMQGTHWPPTFGQGTKVEIKRTVAAPSVFIFPPSDEQLKSGTASVVCLLNNFYPREAKVQWKVDNALQSGNSQESVTEQDSKDSTYSLSSTLTLSKADYEKHKVYACEVTHQGLSSPVTKSFNRGEC

SEQ ID NO: 1803 - protein, 445 aa, synthetic construct
  REGION 1..445: note = CD33-Targeting IgG4 Antibody Heavy Chain
QVQLVQSGAEVKKPGASVKVSCKASGYSFTGYYIHWVRQAPGQGLEWMGWINPNSGGTNYAQKFQGRVTMTRDTSTSTVYMELSSLRSEDTAVYYCARDQWDGYNSGYFDYWGQGTLVTVSSSTKGPSVFPLAPCSRSTSESTAALGCLVKDYFPEPVTVSWNSGALTSGVHTFPAVLQSSGLYSLSSVVTVPSSSLGTKTYTCNVDHKPSNTKVDKRVSKYGPPCPSCPPEFLGGPSVFLFPPKPKDTLMISRTPEVTCVVVDVSQEDPEVQFNWYVDGVEVHNAKTKPREEQFNSTYRVVSVLTVLHQDWLNGKEYKCKVSNKGLPSSIEKTISKAKQPREPQVYTLPPSQEEMTKNQVSLTCLVKGFYPSDIAVEWESNGQPENNYKTTPPVLDSDGSFFLYSRLTVDKSRWQEGNVFSCSVMHEALHNHYTQKSLSLSLGK

SEQ ID NO: 1804 - protein, 444 aa, synthetic construct
  REGION 1..444: note = CD33-Targeting IgG4 Antibody Heavy Chain
EVQLLESGGGLVQPGGSLRLSCAASGFTFSDYYMSWVRQAPGKGLEWVSGISGSGYSTYYADSVKGRFTISRDNSKNTLYLQMNSLRAEDTAVYYCARTFGRGPDWYFDLWGRGTLVTVSSSTKGPSVFPLAPCSRSTSESTAALGCLVKDYFPEPVTVSWNSGALTSGVHTFPAVLQSSGLYSLSSVVTVPSSSLGTKTYTCNVDHKPSNTKVDKRVSKYGPPCPSCPPEFLGGPSVFLFPPKPKDTLMISRTPEVTCVVVDVSQEDPEVQFNWYVDGVEVHNAKTKPREEQFNSTYRVVSVLTVLHQDWLNGKEYKCKVSNKGLPSSIEKTISKAKQPREPQVYTLPPSQEEMTKNQVSLTCLVKGFYPSDIAVEWESNGQPENNYKTTPPVLDSDGSFFLYSRLTVDKSRWQEGNVFSCSVMHEALHNHYTQKSLSLSLGK

SEQ ID NO: 1805 - protein, 445 aa, synthetic construct
  REGION 1..445: note = CD33-Targeting IgG4 Antibody Heavy Chain
EVQLLESGGGLVQPGGSLRLSCAASGFTFSNSDMNWVRQAPGKGLEWVSAISGSGGSTYYADSVKGRFTISRDNSKNTLYLQMNSLRAEDTAVYYCARGREDDYGDYVFDYWGQGTLVTVSSSTKGPSVFPLAPCSRSTSESTAALGCLVKDYFPEPVTVSWNSGALTSGVHTFPAVLQSSGLYSLSSVVTVPSSSLGTKTYTCNVDHKPSNTKVDKRVSKYGPPCPSCPPEFLGGPSVFLFPPKPKDTLMISRTPEVTCVVVDVSQEDPEVQFNWYVDGVEVHNAKTKPREEQFNSTYRVVSVLTVLHQDWLNGKEYKCKVSNKGLPSSIEKTISKAKQPREPQVYTLPPSQEEMTKNQVSLTCLVKGFYPSDIAVEWESNGQPENNYKTTPPVLDSDGSFFLYSRLTVDKSRWQEGNVFSCSVMHEALHNHYTQKSLSLSLGK

SEQ ID NO: 1806 - protein, 439 aa, synthetic construct
  REGION 1..439: note = CD33-Targeting IgG4 Antibody Heavy Chain
QVQLVQSGAEVKKPGASVKVSCKASGGTFSSYAISWVRQAPGQGLEWMGWINPNSGNTGYAQKFQGRVTMTRDTSTSTVYMELSSLRSEDTAVYYCAREHGDMDVWGQGTTVTVSSSTKGPSVFPLAPCSRSTSESTAALGCLVKDYFPEPVTVSWNSGALTSGVHTFPAVLQSSGLYSLSSVVTVPSSSLGTKTYTCNVDHKPSNTKVDKRVSKYGPPCPSCPPEFLGGPSVFLFPPKPKDTLMISRTPEVTCVVVDVSQEDPEVQFNWYVDGVEVHNAKTKPREEQFNSTYRVVSVLTVLHQDWLNGKEYKCKVSNKGLPSSIEKTISKAKQPREPQVYTLPPSQEEMTKNQVSLTCLVKGFYPSDIAVEWESNGQPENNYKTTPPVLDSDGSFFLYSRLTVDKSRWQEGNVFSCSVMHEALHNHYTQKSLSLSLGK

SEQ ID NO: 1807 - protein, 445 aa, synthetic construct
  REGION 1..445: note = CD33-Targeting IgG4 Antibody Heavy Chain
QVQLVQSGAEVKKPGASVKVSCKASGNTFTSYGISWVRQAPGQGLEWMGWINPNSGGTKYAQKFQGRVTMTRDTSTSTVYMELSSLRSEDTAVYYCARESWFGELYYGMDVWGKGTTVTVSSSTKGPSVFPLAPCSRSTSESTAALGCLVKDYFPEPVTVSWNSGALTSGVHTFPAVLQSSGLYSLSSVVTVPSSSLGTKTYTCNVDHKPSNTKVDKRVSKYGPPCPSCPPEFLGGPSVFLFPPKPKDTLMISRTPEVTCVVVDVSQEDPEVQFNWYVDGVEVHNAKTKPREEQFNSTYRVVSVLTVLHQDWLNGKEYKCKVSNKGLPSSIEKTISKAKQPREPQVYTLPPSQEEMTKNQVSLTCLVKGFYPSDIAVEWESNGQPENNYKTTPPVLDSDGSFFLYSRLTVDKSRWQEGNVFSCSVMHEALHNHYTQKSLSLSLGK

SEQ ID NO: 1808 - protein, 440 aa, synthetic construct
  REGION 1..440: note = CD33-Targeting IgG4 Antibody Heavy Chain
QVQLVQSGAEVKKPGASVKVSCKASGYTFTAYYTHWVRQAPGQGLEWMGWMNPNSGHTSYAQKFQGRVTMTRDTSTSTVYMELSSLRSEDTAVYYCAREAYDSFDYWGQGTLVTVSSSTKGPSVFPLAPCSRSTSESTAALGCLVKDYFPEPVTVSWNSGALTSGVHTFPAVLQSSGLYSLSSVVTVPSSSLGTKTYTCNVDHKPSNTKVDKRVSKYGPPCPSCPPEFLGGPSVFLFPPKPKDTLMISRTPEVTCVVVDVSQEDPEVQFNWYVDGVEVHNAKTKPREEQFNSTYRVVSVLTVLHQDWLNGKEYKCKVSNKGLPSSIEKTISKAKQPREPQVYTLPPSQEEMTKNQVSLTCLVKGFYPSDIAVEWESNGQPENNYKTTPPVLDSDGSFFLYSRLTVDKSRWQEGNVFSCSVMHEALHNHYTQKSLSLSLGK

SEQ ID NO: 1809 - protein, 445 aa, synthetic construct
  REGION 1..445: note = CD33-Targeting IgG4 Antibody Heavy Chain
QVQLVQSGAEVKKPGASVKVSCKASGYTFTDYYMHWVRQAPGQGLEWMGWINPNSGGTNYAQKFQGRVTMTRDTSTSTVYMELSSLRSEDTAVYYCARDSRIAVAASSFDYWGQGTLVTVSSSTKGPSVFPLAPCSRSTSESTAALGCLVKDYFPEPVTVSWNSGALTSGVHTFPAVLQSSGLYSLSSVVTVPSSSLGTKTYTCNVDHKPSNTKVDKRVSKYGPPCPSCPPEFLGGPSVFLFPPKPKDTLMISRTPEVTCVVVDVSQEDPEVQFNWYVDGVEVHNAKTKPREEQFNSTYRVVSVLTVLHQDWLNGKEYKCKVSNKGLPSSIEKTISKAKQPREPQVYTLPPSQEEMTKNQVSLTCLVKGFYPSDIAVEWESNGQPENNYKTTPPVLDSDGSFFLYSRLTVDKSRWQEGNVFSCSVMHEALHNHYTQKSLSLSLGK

SEQ ID NO: 1810 - protein, 441 aa, synthetic construct
  REGION 1..441: note = CD33-Targeting IgG4 Antibody Heavy Chain
EVQLLESGGGLVQPGGSLRLSCAASGFTFSSYAMSWVRQAPGKGLEWVSDISGSGSGTYYADAVKGRFTISRDNSKNTLYLQMNSLRAEDTAVYYCARPGSDGEFDYWGQGTLVTVSSSTKGPSVFPLAPCSRSTSESTAALGCLVKDYFPEPVTVSWNSGALTSGVHTFPAVLQSSGLYSLSSVVTVPSSSLGTKTYTCNVDHKPSNTKVDKRVSKYGPPCPSCPPEFLGGPSVFLFPPKPKDTLMISRTPEVTCVVVDVSQEDPEVQFNWYVDGVEVHNAKTKPREEQFNSTYRVVSVLTVLHQDWLNGKEYKCKVSNKGLPSSIEKTISKAKQPREPQVYTLPPSQEEMTKNQVSLTCLVKGFYPSDIAVEWESNGQPENNYKTTPPVLDSDGSFFLYSRLTVDKSRWQEGNVFSCSVMHEALHNHYTQKSLSLSLGK

SEQ ID NO: 1811 - protein, 443 aa, synthetic construct
  REGION 1..443: note = CD33-Targeting IgG4 Antibody Heavy Chain
QVQLVQSGAEVKKPGSSVKVSCKASGGTFSSDAINWVRQAPGQGLEWMGGFDPEDGETIYAQKFQGRVTITADESTSTAYMELSSLRSEDTAVYYCARGPSGYDFEFDYWGQGTLVTVSSSTKGPSVFPLAPCSRSTSESTAALGCLVKDYFPEPVTVSWNSGALTSGVHTFPAVLQSSGLYSLSSVVTVPSSSLGTKTYTCNVDHKPSNTKVDKRVSKYGPPCPSCPPEFLGGPSVFLFPPKPKDTLMISRTPEVTCVVVDVSQEDPEVQFNWYVDGVEVHNAKTKPREEQFNSTYRVVSVLTVLHQDWLNGKEYKCKVSNKGLPSSIEKTISKAKQPREPQVYTLPPSQEEMTKNQVSLTCLVKGFYPSDIAVEWESNGQPENNYKTTPPVLDSDGSFFLYSRLTVDKSRWQEGNVFSCSVMHEALHNHYTQKSLSLSLGK

SEQ ID NO: 1812 - protein, 444 aa, synthetic construct
  REGION 1..444: note = CD33-Targeting IgG4 Antibody Heavy Chain
QVQLVQSGAEVKKPGASVKVSCKASGDTFTTYAISWVRQAPGQGLEWMGWINPNSGVATYANKFQGRVTMTRDTSTSTVYMELSSLRSEDTAVYYCAREGIVGATDAFDIWGQGTMVTVSSSTKGPSVFPLAPCSRSTSESTAALGCLVKDYFPEPVTVSWNSGALTSGVHTFPAVLQSSGLYSLSSVVTVPSSSLGTKTYTCNVDHKPSNTKVDKRVSKYGPPCPSCPPEFLGGPSVFLFPPKPKDTLMISRTPEVTCVVVDVSQEDPEVQFNWYVDGVEVHNAKTKPREEQFNSTYRVVSVLTVLHQDWLNGKEYKCKVSNKGLPSSIEKTISKAKQPREPQVYTLPPSQEEMTKNQVSLTCLVKGFYPSDIAVEWESNGQPENNYKTTPPVLDSDGSFFLYSRLTVDKSRWQEGNVFSCSVMHEALHNHYTQKSLSLSLGK

SEQ ID NO: 1813 - protein, 445 aa, synthetic construct
  REGION 1..445: note = CD33-Targeting IgG4 Antibody Heavy Chain
QVQLVQSGAEVKKPGASVKVSCKASGDTFTNHYMHWVRQAPGQGLEWMGWINPNSGGTNYAQKFQGRVTMTRDTSTSTVYMELSSLRSEDTAVYYCARDLVPAAVGGYFDYWGQGTLVTVSSSTKGPSVFPLAPCSRSTSESTAALGCLVKDYFPEPVTVSWNSGALTSGVHTFPAVLQSSGLYSLSSVVTVPSSSLGTKTYTCNVDHKPSNTKVDKRVSKYGPPCPSCPPEFLGGPSVFLFPPKPKDTLMISRTPEVTCVVVDVSQEDPEVQFNWYVDGVEVHNAKTKPREEQFNSTYRVVSVLTVLHQDWLNGKEYKCKVSNKGLPSSIEKTISKAKQPREPQVYTLPPSQEEMTKNQVSLTCLVKGFYPSDIAVEWESNGQPENNYKTTPPVLDSDGSFFLYSRLTVDKSRWQEGNVFSCSVMHEALHNHYTQKSLSLSLGK

SEQ ID NO: 1814 - protein, 441 aa, synthetic construct
  REGION 1..441: note = CD33-Targeting IgG4 Antibody Heavy Chain
EVQLLESGGGLVQPGGSLRLSCAASGFTFSSHWMSWVRQAPGKGLEWVSAISGSGGSTYYADSVKGRFTISRDNSKNTLYLQMNSLRAEDTAVYYCARDDNSGSQADWGQGTLVTVSSSTKGPSVFPLAPCSRSTSESTAALGCLVKDYFPEPVTVSWNSGALTSGVHTFPAVLQSSGLYSLSSVVTVPSSSLGTKTYTCNVDHKPSNTKVDKRVSKYGPPCPSCPPEFLGGPSVFLFPPKPKDTLMISRTPEVTCVVVDVSQEDPEVQFNWYVDGVEVHNAKTKPREEQFNSTYRVVSVLTVLHQDWLNGKEYKCKVSNKGLPSSIEKTISKAKQPREPQVYTLPPSQEEMTKNQVSLTCLVKGFYPSDIAVEWESNGQPENNYKTTPPVLDSDGSFFLYSRLTVDKSRWQEGNVFSCSVMHEALHNHYTQKSLSLSLGK

SEQ ID NO: 1815 - protein, 445 aa, synthetic construct
  REGION 1..445: note = CD33-Targeting IgG4 Antibody Heavy Chain
QVQLVQSGAEVKKPGASVKVSCKASGYSFTGYYMHWVRQAPGQGLEWMGWINPNSGGTYFAQNFQGRVTMTRDTSTSTVYMELSSLRSEDTAVYYCVKDRGDRVVTSYLDYWGQGTLVTVSSSTKGPSVFPLAPCSRSTSESTAALGCLVKDYFPEPVTVSWNSGALTSGVHTFPAVLQSSGLYSLSSVVTVPSSSLGTKTYTCNVDHKPSNTKVDKRVSKYGPPCPSCPPEFLGGPSVFLFPPKPKDTLMISRTPEVTCVVVDVSQEDPEVQFNWYVDGVEVHNAKTKPREEQFNSTYRVVSVLTVLHQDWLNGKEYKCKVSNKGLPSSIEKTISKAKQPREPQVYTLPPSQEEMTKNQVSLTCLVKGFYPSDIAVEWESNGQPENNYKTTPPVLDSDGSFFLYSRLTVDKSRWQEGNVFSCSVMHEALHNHYTQKSLSLSLGK

SEQ ID NO: 1816 - protein, 452 aa, synthetic construct
  REGION 1..452: note = CD33-Targeting IgG4 Antibody Heavy Chain
QVQLVQSGAEVKKPGASVKVSCKASGYTFTGYYMHWVRQAPGQGLEWMGIINPSGGSTSYAQKFQGRVTMTRDTSTSTVYMELSSLRSEDTAVYYCARAAPYYYDSSGYYSGGYYFDYWGQGTLVTVSSSTKGPSVFPLAPCSRSTSESTAALGCLVKDYFPEPVTVSWNSGALTSGVHTFPAVLQSSGLYSLSSVVTVPSSSLGTKTYTCNVDHKPSNTKVDKRVSKYGPPCPSCPPEFLGGPSVFLFPPKPKDTLMISRTPEVTCVVVDVSQEDPEVQFNWYVDGVEVHNAKTKPREEQFNSTYRVVSVLTVLHQDWLNGKEYKCKVSNKGLPSSIEKTISKAKQPREPQVYTLPPSQEEMTKNQVSLTCLVKGFYPSDIAVEWESNGQPENNYKTTPPVLDSDGSFFLYSRLTVDKSRWQEGNVFSCSVMHEALHNHYTQKSLSLSLGK

SEQ ID NO: 1817 - protein, 450 aa, synthetic construct
  REGION 1..450: note = CD33-Targeting IgG4 Antibody Heavy Chain
EVQLLESGGGLVQPGGSLRLSCAASGFTFSIYEIHWVRQAPGKGLEWVSAISGSGGSTYYADSVKGRFTISRDNSKNTLYLQMNSLRAEDTAVYYCARSYCGGDCWDYYYYYGMDVWGQGTTVTVSSSTKGPSVFPLAPCSRSTSESTAALGCLVKDYFPEPVTVSWNSGALTSGVHTFPAVLQSSGLYSLSSVVTVPSSSLGTKTYTCNVDHKPSNTKVDKRVSKYGPPCPSCPPEFLGGPSVFLFPPKPKDTLMISRTPEVTCVVVDVSQEDPEVQFNWYVDGVEVHNAKTKPREEQFNSTYRVVSVLTVLHQDWLNGKEYKCKVSNKGLPSSIEKTISKAKQPREPQVYTLPPSQEEMTKNQVSLTCLVKGFYPSDIAVEWESNGQPENNYKTTPPVLDSDGSFFLYSRLTVDKSRWQEGNVFSCSVMHEALHNHYTQKSLSLSLGK

SEQ ID NO: 1818 - protein, 444 aa, synthetic construct
  REGION 1..444: note = CD33-Targeting IgG4 Antibody Heavy Chain
EVQLVESGGGLVKPGGSLRLSCAASGFTFSDNSMNWVRQAPGKGLEWVSYISSSGSTIYYADSVKGRFTISRDDSKNTLYLQMNSLKTEDTAVYYCARGRASSWPNWFDPWGQGTLVTVSSSTKGPSVFPLAPCSRSTSESTAALGCLVKDYFPEPVTVSWNSGALTSGVHTFPAVLQSSGLYSLSSVVTVPSSSLGTKTYTCNVDHKPSNTKVDKRVSKYGPPCPSCPPEFLGGPSVFLFPPKPKDTLMISRTPEVTCVVVDVSQEDPEVQFNWYVDGVEVHNAKTKPREEQFNSTYRVVSVLTVLHQDWLNGKEYKCKVSNKGLPSSIEKTISKAKQPREPQVYTLPPSQEEMTKNQVSLTCLVKGFYPSDIAVEWESNGQPENNYKTTPPVLDSDGSFFLYSRLTVDKSRWQEGNVFSCSVMHEALHNHYTQKSLSLSLGK

SEQ ID NO: 1819 - protein, 439 aa, synthetic construct
  REGION 1..439: note = CD33-Targeting IgG4 Antibody Heavy Chain
EVQLLESGGGLVQPGGSLRLSCAASGFTFSSYAMSWVRQAPGKGLEWVSGISYDSDKIGYADAVKGRFTISRDNSKNTLYLQMNSLRAEDTAVYYCAREWEGFDYWGQGTLVTVSSSTKGPSVFPLAPCSRSTSESTAALGCLVKDYFPEPVTVSWNSGALTSGVHTFPAVLQSSGLYSLSSVVTVPSSSLGTKTYTCNVDHKPSNTKVDKRVSKYGPPCPSCPPEFLGGPSVFLFPPKPKDTLMISRTPEVTCVVVDVSQEDPEVQFNWYVDGVEVHNAKTKPREEQFNSTYRVVSVLTVLHQDWLNGKEYKCKVSNKGLPSSIEKTISKAKQPREPQVYTLPPSQEEMTKNQVSLTCLVKGFYPSDIAVEWESNGQPENNYKTTPPVLDSDGSFFLYSRLTVDKSRWQEGNVFSCSVMHEALHNHYTQKSLSLSLGK

SEQ ID NO: 1820 - protein, 448 aa, synthetic construct
  REGION 1..448: note = CD33-Targeting IgG4 Antibody Heavy Chain
QVQLVQSGAEVKKPGASVKVSCKASGYTFTDHYMHWVRQAPGQGLEWMGWINPNSGGTNYAQKFQGRVTMTRDTSTSTVYMELSSLRSEDTAVYYCAKDKFGDEGSGWYGDFQHWGQGTLVTVSSSTKGPSVFPLAPCSRSTSESTAALGCLVKDYFPEPVTVSWNSGALTSGVHTFPAVLQSSGLYSLSSVVTVPSSSLGTKTYTCNVDHKPSNTKVDKRVSKYGPPCPSCPPEFLGGPSVFLFPPKPKDTLMISRTPEVTCVVVDVSQEDPEVQFNWYVDGVEVHNAKTKPREEQFNSTYRVVSVLTVLHQDWLNGKEYKCKVSNKGLPSSIEKTISKAKQPREPQVYTLPPSQEEMTKNQVSLTCLVKGFYPSDIAVEWESNGQPENNYKTTPPVLDSDGSFFLYSRLTVDKSRWQEGNVFSCSVMHEALHNHYTQKSLSLSLGK

SEQ ID NO: 1821 - protein, 438 aa, synthetic construct
  REGION 1..438: note = CD33-Targeting IgG4 Antibody Heavy Chain
EVQLLESGGGLVQPGGSLRLSCAASGFTFSSYWMHWVRQAPGKGLEWVSGFSGSARTYYADSVKGRFTISRDNSKNTLYLQMNSLRAEDTAVYYCAREWSGFDYWGQGTLVTVSSSTKGPSVFPLAPCSRSTSESTAALGCLVKDYFPEPVTVSWNSGALTSGVHTFPAVLQSSGLYSLSSVVTVPSSSLGTKTYTCNVDHKPSNTKVDKRVSKYGPPCPSCPPEFLGGPSVFLFPPKPKDTLMISRTPEVTCVVVDVSQEDPEVQFNWYVDGVEVHNAKTKPREEQFNSTYRVVSVLTVLHQDWLNGKEYKCKVSNKGLPSSIEKTISKAKQPREPQVYTLPPSQEEMTKNQVSLTCLVKGFYPSDIAVEWESNGQPENNYKTTPPVLDSDGSFFLYSRLTVDKSRWQEGNVFSCSVMHEALHNHYTQKSLSLSLGK

SEQ ID NO: 1822 - protein, 445 aa, synthetic construct
  REGION 1..445: note = CD33-Targeting IgG4 Antibody Heavy Chain
QVQLVQSGAEVKKPGASVKVSCKASGYMFTGYYIHWVRQAPGQGLEWMGWINPNSGGTNYAQKFQGRVTMTRDTSTSTVYMELSSLRSEDTAVYYCAKDRFGSGNYGYMDVWGKGTTVTVSSSTKGPSVFPLAPCSRSTSESTAALGCLVKDYFPEPVTVSWNSGALTSGVHTFPAVLQSSGLYSLSSVVTVPSSSLGTKTYTCNVDHKPSNTKVDKRVSKYGPPCPSCPPEFLGGPSVFLFPPKPKDTLMISRTPEVTCVVVDVSQEDPEVQFNWYVDGVEVHNAKTKPREEQFNSTYRVVSVLTVLHQDWLNGKEYKCKVSNKGLPSSIEKTISKAKQPREPQVYTLPPSQEEMTKNQVSLTCLVKGFYPSDIAVEWESNGQPENNYKTTPPVLDSDGSFFLYSRLTVDKSRWQEGNVFSCSVMHEALHNHYTQKSLSLSLGK

SEQ ID NO: 1823 - protein, 446 aa, synthetic construct
  REGION 1..446: note = CD33-Targeting IgG4 Antibody Heavy Chain
EVQLLESGGGLVQPGGSLRLSCAASGFTFSSYAMSWVRQAPGKGLEWVSAISGSGGSTYYADSVKGRFTISRDNSKNTLYLQMNSLRAEDTAVYYCARELSHDYGGNSDFDYWGQGTLVTVSSSTKGPSVFPLAPCSRSTSESTAALGCLVKDYFPEPVTVSWNSGALTSGVHTFPAVLQSSGLYSLSSVVTVPSSSLGTKTYTCNVDHKPSNTKVDKRVSKYGPPCPSCPPEFLGGPSVFLFPPKPKDTLMISRTPEVTCVVVDVSQEDPEVQFNWYVDGVEVHNAKTKPREEQFNSTYRVVSVLTVLHQDWLNGKEYKCKVSNKGLPSSIEKTISKAKQPREPQVYTLPPSQEEMTKNQVSLTCLVKGFYPSDIAVEWESNGQPENNYKTTPPVLDSDGSFFLYSRLTVDKSRWQEGNVFSCSVMHEALHNHYTQKSLSLSLGK

SEQ ID NO: 1824 - protein, 445 aa, synthetic construct
  REGION 1..445: note = CD33-Targeting IgG4 Antibody Heavy Chain
QVQLVQSGAEVKKPGASVKVSCKASGYTFTDYYIHWVRQAPGQGLEWMGWINPNSGGTNYAQEFQGRVTMTRDTSTSTVYMELSSLRSEDTAVYYCARDHRIAVAGSYFDYWGQGTLVTVSSSTKGPSVFPLAPCSRSTSESTAALGCLVKDYFPEPVTVSWNSGALTSGVHTFPAVLQSSGLYSLSSVVTVPSSSLGTKTYTCNVDHKPSNTKVDKRVSKYGPPCPSCPPEFLGGPSVFLFPPKPKDTLMISRTPEVTCVVVDVSQEDPEVQFNWYVDGVEVHNAKTKPREEQFNSTYRVVSVLTVLHQDWLNGKEYKCKVSNKGLPSSIEKTISKAKQPREPQVYTLPPSQEEMTKNQVSLTCLVKGFYPSDIAVEWESNGQPENNYKTTPPVLDSDGSFFLYSRLTVDKSRWQEGNVFSCSVMHEALHNHYTQKSLSLSLGK

SEQ ID NO: 1825 - protein, 447 aa, synthetic construct
  REGION 1..447: note = CD33-Targeting IgG4 Antibody Heavy Chain
QVQLVQSGAEVKKPGASVKVSCKASGYPFTAHYIHWVRQAPGQGLEWMGWINPNSGGTNYAQKFQGRVTMTRDTSTSTVYMELSSLRSEDTAVYYCARDVEMATIGAYWYFDLWGRGTLVTVSSSTKGPSVFPLAPCSRSTSESTAALGCLVKDYFPEPVTVSWNSGALTSGVHTFPAVLQSSGLYSLSSVVTVPSSSLGTKTYTCNVDHKPSNTKVDKRVSKYGPPCPSCPPEFLGGPSVFLFPPKPKDTLMISRTPEVTCVVVDVSQEDPEVQFNWYVDGVEVHNAKTKPREEQFNSTYRVVSVLTVLHQDWLNGKEYKCKVSNKGLPSSIEKTISKAKQPREPQVYTLPPSQEEMTKNQVSLTCLVKGFYPSDIAVEWESNGQPENNYKTTPPVLDSDGSFFLYSRLTVDKSRWQEGNVFSCSVMHEALHNHYTQKSLSLSLGK

SEQ ID NO: 1826 - protein, 442 aa, synthetic construct
  REGION 1..442: note = CD33-Targeting IgG4 Antibody Heavy Chain
QVQLVQSGAEVKKPGSSVKVSCKASGYSFTSYGISWVRQAPGQGLEWLGWISAYNGNTNYGQSLQGRVTITADESTSTAYMELSSLRSEDTAVYYCARARGAGTFFDYWGQGTLVTVSSSTKGPSVFPLAPCSRSTSESTAALGCLVKDYFPEPVTVSWNSGALTSGVHTFPAVLQSSGLYSLSSVVTVPSSSLGTKTYTCNVDHKPSNTKVDKRVSKYGPPCPSCPPEFLGGPSVFLFPPKPKDTLMISRTPEVTCVVVDVSQEDPEVQFNWYVDGVEVHNAKTKPREEQFNSTYRVVSVLTVLHQDWLNGKEYKCKVSNKGLPSSIEKTISKAKQPREPQVYTLPPSQEEMTKNQVSLTCLVKGFYPSDIAVEWESNGQPENNYKTTPPVLDSDGSFFLYSRLTVDKSRWQEGNVFSCSVMHEALHNHYTQKSLSLSLGK

SEQ ID NO: 1827 - protein, 442 aa, synthetic construct
  REGION 1..442: note = CD33-Targeting IgG4 Antibody Heavy Chain
QVQLVQSGAEVKKPGASVKVSCKASGYTFTGYYMHWVRQAPGQGLEWMGRINPNGGSTTYAQKFQGRVTMTRDTSTSTVYMELSSLRSEDTAVYYCARDDFYYYYLDFWGKGTTVTVSSSTKGPSVFPLAPCSRSTSESTAALGCLVKDYFPEPVTVSWNSGALTSGVHTFPAVLQSSGLYSLSSVVTVPSSSLGTKTYTCNVDHKPSNTKVDKRVSKYGPPCPSCPPEFLGGPSVFLFPPKPKDTLMISRTPEVTCVVVDVSQEDPEVQFNWYVDGVEVHNAKTKPREEQFNSTYRVVSVLTVLHQDWLNGKEYKCKVSNKGLPSSIEKTISKAKQPREPQVYTLPPSQEEMTKNQVSLTCLVKGFYPSDIAVEWESNGQPENNYKTTPPVLDSDGSFFLYSRLTVDKSRWQEGNVFSCSVMHEALHNHYTQKSLSLSLGK

SEQ ID NO: 1828 - protein, 444 aa, synthetic construct
  REGION 1..444: note = CD33-Targeting IgG4 Antibody Heavy Chain
QVQLVQSGAEVKKPGASVKVSCKASGYTFTENEMHWVRQAPGQGLEWMGWMNPNSGNTGYAQKFQGRVTMTRDTSTSTVYMELSSLRSEDTAVYYCAREGGDWPYYYMDVWGKGTTVTVSSSTKGPSVFPLAPCSRSTSESTAALGCLVKDYFPEPVTVSWNSGALTSGVHTFPAVLQSSGLYSLSSVVTVPSSSLGTKTYTCNVDHKPSNTKVDKRVSKYGPPCPSCPPEFLGGPSVFLFPPKPKDTLMISRTPEVTCVVVDVSQEDPEVQFNWYVDGVEVHNAKTKPREEQFNSTYRVVSVLTVLHQDWLNGKEYKCKVSNKGLPSSIEKTISKAKQPREPQVYTLPPSQEEMTKNQVSLTCLVKGFYPSDIAVEWESNGQPENNYKTTPPVLDSDGSFFLYSRLTVDKSRWQEGNVFSCSVMHEALHNHYTQKSLSLSLGK

SEQ ID NO: 1829 - protein, 448 aa, synthetic construct
  REGION 1..448: note = CD33-Targeting IgG4 Antibody Heavy Chain
QVQLVQSGAEVKKPGASVKVSCKASGYTLTGYYMHWVRQAPGQGLEWMGWMNPSSGNTGYAQQFQGRVTMTRDTSTSTVYMELSSLRSEDTAVYYCARASSDRYYYDGVWYFDLWGRGTLVTVSSSTKGPSVFPLAPCSRSTSESTAALGCLVKDYFPEPVTVSWNSGALTSGVHTFPAVLQSSGLYSLSSVVTVPSSSLGTKTYTCNVDHKPSNTKVDKRVSKYGPPCPSCPPEFLGGPSVFLFPPKPKDTLMISRTPEVTCVVVDVSQEDPEVQFNWYVDGVEVHNAKTKPREEQFNSTYRVVSVLTVLHQDWLNGKEYKCKVSNKGLPSSIEKTISKAKQPREPQVYTLPPSQEEMTKNQVSLTCLVKGFYPSDIAVEWESNGQPENNYKTTPPVLDSDGSFFLYSRLTVDKSRWQEGNVFSCSVMHEALHNHYTQKSLSLSLGK

SEQ ID NO: 1830 - protein, 442 aa, synthetic construct
  REGION 1..442: note = CD33-Targeting IgG4 Antibody Heavy Chain
EVQLLESGGGLVQPGGSLRLSCAASGFTFSTYAMHWVRQAPGKGLEWVSAISGSGGSTYYADSVKGRFTISRDNSKNTLYLQMNSLRAEDTAVYYCARDGYGDYPFDYWGQGTLVTVSSSTKGPSVFPLAPCSRSTSESTAALGCLVKDYFPEPVTVSWNSGALTSGVHTFPAVLQSSGLYSLSSVVTVPSSSLGTKTYTCNVDHKPSNTKVDKRVSKYGPPCPSCPPEFLGGPSVFLFPPKPKDTLMISRTPEVTCVVVDVSQEDPEVQFNWYVDGVEVHNAKTKPREEQFNSTYRVVSVLTVLHQDWLNGKEYKCKVSNKGLPSSIEKTISKAKQPREPQVYTLPPSQEEMTKNQVSLTCLVKGFYPSDIAVEWESNGQPENNYKTTPPVLDSDGSFFLYSRLTVDKSRWQEGNVFSCSVMHEALHNHYTQKSLSLSLGK

SEQ ID NO: 1831 - protein, 440 aa, synthetic construct
  REGION 1..440: note = CD33-Targeting IgG4 Antibody Heavy Chain
QVQLVQSGAEVKKPGASVKVSCKASGYTFTGYYLHWVRQAPGQGLEWMGVINVRRGSTRYAQNFQGRVTMTRDTSTSTVYMELSSLRSEDTAVYYCARVSGSYYQPWGQGTLVTVSSSTKGPSVFPLAPCSRSTSESTAALGCLVKDYFPEPVTVSWNSGALTSGVHTFPAVLQSSGLYSLSSVVTVPSSSLGTKTYTCNVDHKPSNTKVDKRVSKYGPPCPSCPPEFLGGPSVFLFPPKPKDTLMISRTPEVTCVVVDVSQEDPEVQFNWYVDGVEVHNAKTKPREEQFNSTYRVVSVLTVLHQDWLNGKEYKCKVSNKGLPSSIEKTISKAKQPREPQVYTLPPSQEEMTKNQVSLTCLVKGFYPSDIAVEWESNGQPENNYKTTPPVLDSDGSFFLYSRLTVDKSRWQEGNVFSCSVMHEALHNHYTQKSLSLSLGK

SEQ ID NO: 1832 - protein, 443 aa, synthetic construct
  REGION 1..443: note = CD33-Targeting IgG4 Antibody Heavy Chain
QVQLVQSGAEVKKPGASVKVSCKASGYTFSNYYMHWVRQAPGQGLEWMGWMNPDSGTTGYAQKFQGRVTMTRDTSTSTVYMELSSLRSEDTAVYYCVRDGTMVQGIFDYWGQGTLVTVSSSTKGPSVFPLAPCSRSTSESTAALGCLVKDYFPEPVTVSWNSGALTSGVHTFPAVLQSSGLYSLSSVVTVPSSSLGTKTYTCNVDHKPSNTKVDKRVSKYGPPCPSCPPEFLGGPSVFLFPPKPKDTLMISRTPEVTCVVVDVSQEDPEVQFNWYVDGVEVHNAKTKPREEQFNSTYRVVSVLTVLHQDWLNGKEYKCKVSNKGLPSSIEKTISKAKQPREPQVYTLPPSQEEMTKNQVSLTCLVKGFYPSDIAVEWESNGQPENNYKTTPPVLDSDGSFFLYSRLTVDKSRWQEGNVFSCSVMHEALHNHYTQKSLSLSLGK

SEQ ID NO: 1833 - protein, 440 aa, synthetic construct
  REGION 1..440: note = CD33-Targeting IgG4 Antibody Heavy Chain
QVQLVQSGAEVKKPGSSVKVSCKASGGTFSTYAITWVRQAPGQGLEWMGGIIPIVGRANYAQKFQGRVTITADESTSTAYMELSSLRSEDTAVYYCARSGGHDLDYWGQGTLVTVSSSTKGPSVFPLAPCSRSTSESTAALGCLVKDYFPEPVTVSWNSGALTSGVHTFPAVLQSSGLYSLSSVVTVPSSSLGTKTYTCNVDHKPSNTKVDKRVSKYGPPCPSCPPEFLGGPSVFLFPPKPKDTLMISRTPEVTCVVVDVSQEDPEVQFNWYVDGVEVHNAKTKPREEQFNSTYRVVSVLTVLHQDWLNGKEYKCKVSNKGLPSSIEKTISKAKQPREPQVYTLPPSQEEMTKNQVSLTCLVKGFYPSDIAVEWESNGQPENNYKTTPPVLDSDGSFFLYSRLTVDKSRWQEGNVFSCSVMHEALHNHYTQKSLSLSLGK

SEQ ID NO: 1834 - protein, 445 aa, synthetic construct
  REGION 1..445: note = CD33-Targeting IgG4 Antibody Heavy Chain
EVQLLESGGGLVQPGGSLRLSCAASGFTFSSYGMHWVRQAPGKGLEWVSSISGSGDTTYYADSVKGRFTISRDNSKNTLYLQMNSLRAEDTAVYYCARDNPYGDYGGSFDYWGQGTLVTVSSSTKGPSVFPLAPCSRSTSESTAALGCLVKDYFPEPVTVSWNSGALTSGVHTFPAVLQSSGLYSLSSVVTVPSSSLGTKTYTCNVDHKPSNTKVDKRVSKYGPPCPSCPPEFLGGPSVFLFPPKPKDTLMISRTPEVTCVVVDVSQEDPEVQFNWYVDGVEVHNAKTKPREEQFNSTYRVVSVLTVLHQDWLNGKEYKCKVSNKGLPSSIEKTISKAKQPREPQVYTLPPSQEEMTKNQVSLTCLVKGFYPSDIAVEWESNGQPENNYKTTPPVLDSDGSFFLYSRLTVDKSRWQEGNVFSCSVMHEALHNHYTQKSLSLSLGK

SEQ ID NO: 1835 - protein, 445 aa, synthetic construct
  REGION 1..445: note = CD33-Targeting IgG4 Antibody Heavy Chain
QVQLVQSGAEVKKPGASVKVSCKASGYTFTSYYMHWVRQAPGQGLEWMGIIDPSGGSTNYAQKFQGRVTMTRDTSTSTVYMELSSLRSEDTAVYYCARDYYGSGSYYGLDYWGRGTLVTVSSSTKGPSVFPLAPCSRSTSESTAALGCLVKDYFPEPVTVSWNSGALTSGVHTFPAVLQSSGLYSLSSVVTVPSSSLGTKTYTCNVDHKPSNTKVDKRVSKYGPPCPSCPPEFLGGPSVFLFPPKPKDTLMISRTPEVTCVVVDVSQEDPEVQFNWYVDGVEVHNAKTKPREEQFNSTYRVVSVLTVLHQDWLNGKEYKCKVSNKGLPSSIEKTISKAKQPREPQVYTLPPSQEEMTKNQVSLTCLVKGFYPSDIAVEWESNGQPENNYKTTPPVLDSDGSFFLYSRLTVDKSRWQEGNVFSCSVMHEALHNHYTQKSLSLSLGK

SEQ ID NO: 1836 - protein, 443 aa, synthetic construct
  REGION 1..443: note = CD33-Targeting IgG4 Antibody Heavy Chain
QVQLVQSGAEVKKPGASVKVSCKASGYTFTDYYMHWVRQAPGQGLEWMGIINPSGGSTRYAQKFQGRVTMTRDTSTSTVYMELSSLRSEDTAVYYCARVDGRRWLQSDYWGQGTLVTVSSSTKGPSVFPLAPCSRSTSESTAALGCLVKDYFPEPVTVSWNSGALTSGVHTFPAVLQSSGLYSLSSVVTVPSSSLGTKTYTCNVDHKPSNTKVDKRVSKYGPPCPSCPPEFLGGPSVFLFPPKPKDTLMISRTPEVTCVVVDVSQEDPEVQFNWYVDGVEVHNAKTKPREEQFNSTYRVVSVLTVLHQDWLNGKEYKCKVSNKGLPSSIEKTISKAKQPREPQVYTLPPSQEEMTKNQVSLTCLVKGFYPSDIAVEWESNGQPENNYKTTPPVLDSDGSFFLYSRLTVDKSRWQEGNVFSCSVMHEALHNHYTQKSLSLSLGK

SEQ ID NO: 1837 - protein, 443 aa, synthetic construct
  REGION 1..443: note = CD33-Targeting IgG4 Antibody Heavy Chain
QVQLVQSGAEVKKPGASVKVSCKASGYTFTDYYMHWVRQAPGQGLEWMGIINPSGGSTRYAQKFQGRVTMTRDTSTSTVYMELSSLRSEDTAVYYCARVDGRRWLRSDYWGQGTLVTVSSSTKGPSVFPLAPCSRSTSESTAALGCLVKDYFPEPVTVSWNSGALTSGVHTFPAVLQSSGLYSLSSVVTVPSSSLGTKTYTCNVDHKPSNTKVDKRVSKYGPPCPSCPPEFLGGPSVFLFPPKPKDTLMISRTPEVTCVVVDVSQEDPEVQFNWYVDGVEVHNAKTKPREEQFNSTYRVVSVLTVLHQDWLNGKEYKCKVSNKGLPSSIEKTISKAKQPREPQVYTLPPSQEEMTKNQVSLTCLVKGFYPSDIAVEWESNGQPENNYKTTPPVLDSDGSFFLYSRLTVDKSRWQEGNVFSCSVMHEALHNHYTQKSLSLSLGK

SEQ ID NO: 1838 - protein, 444 aa, synthetic construct
  REGION 1..444: note = CD33-Targeting IgG4 Antibody Heavy Chain
QVQLVQSGAEVKKPGASVKVSCKASGGTFSSYAISWVRQAPGQGLEWLGIISPSGRSAGYGRKFQGRVTMTRDTSTSTVYMELSSLRSEDTAVYYCARTDYGGHKWYFDLWGRGTLVTVSSSTKGPSVFPLAPCSRSTSESTAALGCLVKDYFPEPVTVSWNSGALTSGVHTFPAVLQSSGLYSLSSVVTVPSSSLGTKTYTCNVDHKPSNTKVDKRVSKYGPPCPSCPPEFLGGPSVFLFPPKPKDTLMISRTPEVTCVVVDVSQEDPEVQFNWYVDGVEVHNAKTKPREEQFNSTYRVVSVLTVLHQDWLNGKEYKCKVSNKGLPSSIEKTISKAKQPREPQVYTLPPSQEEMTKNQVSLTCLVKGFYPSDIAVEWESNGQPENNYKTTPPVLDSDGSFFLYSRLTVDKSRWQEGNVFSCSVMHEALHNHYTQKSLSLSLGK

SEQ ID NO: 1839 - protein, 442 aa, synthetic construct
  REGION 1..442: note = CD33-Targeting IgG4 Antibody Heavy Chain
QVQLVQSGAEVKKPGASVKVSCKASGYTFTGYYLHWVRQAPGQGLEWMGVISPSGGGTSYAQKFQGRVTMTRDTSTSTVYMELSSLRSEDTAVYYCARAGFGEGVFRHWGQGTLVTVSSSTKGPSVFPLAPCSRSTSESTAALGCLVKDYFPEPVTVSWNSGALTSGVHTFPAVLQSSGLYSLSSVVTVPSSSLGTKTYTCNVDHKPSNTKVDKRVSKYGPPCPSCPPEFLGGPSVFLFPPKPKDTLMISRTPEVTCVVVDVSQEDPEVQFNWYVDGVEVHNAKTKPREEQFNSTYRVVSVLTVLHQDWLNGKEYKCKVSNKGLPSSIEKTISKAKQPREPQVYTLPPSQEEMTKNQVSLTCLVKGFYPSDIAVEWESNGQPENNYKTTPPVLDSDGSFFLYSRLTVDKSRWQEGNVFSCSVMHEALHNHYTQKSLSLSLGK

SEQ ID NO: 1840 - protein, 445 aa, synthetic construct
  REGION 1..445: note = CD33-Targeting IgG4 Antibody Heavy Chain
QVQLVQSGAEVKKPGASVKVSCKASGYSFTSHAISWVRQAPGQGLEWMGWIKPNSGDTKYAQKFQGRVTMTRDTSTSTVYMELSSLRSEDTAVYYCARGSDDYYGSYYFDYWGQGTLVTVSSSTKGPSVFPLAPCSRSTSESTAALGCLVKDYFPEPVTVSWNSGALTSGVHTFPAVLQSSGLYSLSSVVTVPSSSLGTKTYTCNVDHKPSNTKVDKRVSKYGPPCPSCPPEFLGGPSVFLFPPKPKDTLMISRTPEVTCVVVDVSQEDPEVQFNWYVDGVEVHNAKTKPREEQFNSTYRVVSVLTVLHQDWLNGKEYKCKVSNKGLPSSIEKTISKAKQPREPQVYTLPPSQEEMTKNQVSLTCLVKGFYPSDIAVEWESNGQPENNYKTTPPVLDSDGSFFLYSRLTVDKSRWQEGNVFSCSVMHEALHNHYTQKSLSLSLGK

SEQ ID NO: 1841 - protein, 440 aa, synthetic construct
  REGION 1..440: note = CD33-Targeting IgG4 Antibody Heavy Chain
EVQLLESGGGLVQPGGSLRLSCAASGFTFRNYGMGWVRQAPGKGLEWVSAISGSGGSTYYADSVKGRFTISRDNSKNTLYLQMNSLRAEDTAVYYCARVKFYGMDVWGQGTTVTVSSSTKGPSVFPLAPCSRSTSESTAALGCLVKDYFPEPVTVSWNSGALTSGVHTFPAVLQSSGLYSLSSVVTVPSSSLGTKTYTCNVDHKPSNTKVDKRVSKYGPPCPSCPPEFLGGPSVFLFPPKPKDTLMISRTPEVTCVVVDVSQEDPEVQFNWYVDGVEVHNAKTKPREEQFNSTYRVVSVLTVLHQDWLNGKEYKCKVSNKGLPSSIEKTISKAKQPREPQVYTLPPSQEEMTKNQVSLTCLVKGFYPSDIAVEWESNGQPENNYKTTPPVLDSDGSFFLYSRLTVDKSRWQEGNVFSCSVMHEALHNHYTQKSLSLSLGK

SEQ ID NO: 1842 - protein, 445 aa, synthetic construct
  REGION 1..445: note = CD33-Targeting IgG4 Antibody Heavy Chain
QVQLVQSGAEVKKPGASVKVSCKASGYTFTDYHMHWVRQAPGQGLEWMGWMSPNSGNTGYAQNFQGRVTMTRDTSTSTVYMELSSLRSEDTAVYYCARADYYGSDYVKFDYWGQGTLVTVSSSTKGPSVFPLAPCSRSTSESTAALGCLVKDYFPEPVTVSWNSGALTSGVHTFPAVLQSSGLYSLSSVVTVPSSSLGTKTYTCNVDHKPSNTKVDKRVSKYGPPCPSCPPEFLGGPSVFLFPPKPKDTLMISRTPEVTCVVVDVSQEDPEVQFNWYVDGVEVHNAKTKPREEQFNSTYRVVSVLTVLHQDWLNGKEYKCKVSNKGLPSSIEKTISKAKQPREPQVYTLPPSQEEMTKNQVSLTCLVKGFYPSDIAVEWESNGQPENNYKTTPPVLDSDGSFFLYSRLTVDKSRWQEGNVFSCSVMHEALHNHYTQKSLSLSLGK

SEQ ID NO: 1843 - protein, 445 aa, synthetic construct
  REGION 1..445: note = CD33-Targeting IgG4 Antibody Heavy Chain
QVQLVQSGAEVKKPGASVKVSCKASGYTFPNYGISWVRQAPGQGLEWMGWINPNSGGTKYAQRFQGRVTMTRDTSTSTVYMELSSLRSEDTAVYYCARDRDILTGYYHFDYWGQGTLVTVSSSTKGPSVFPLAPCSRSTSESTAALGCLVKDYFPEPVTVSWNSGALTSGVHTFPAVLQSSGLYSLSSVVTVPSSSLGTKTYTCNVDHKPSNTKVDKRVSKYGPPCPSCPPEFLGGPSVFLFPPKPKDTLMISRTPEVTCVVVDVSQEDPEVQFNWYVDGVEVHNAKTKPREEQFNSTYRVVSVLTVLHQDWLNGKEYKCKVSNKGLPSSIEKTISKAKQPREPQVYTLPPSQEEMTKNQVSLTCLVKGFYPSDIAVEWESNGQPENNYKTTPPVLDSDGSFFLYSRLTVDKSRWQEGNVFSCSVMHEALHNHYTQKSLSLSLGK

SEQ ID NO: 1844 - protein, 447 aa, synthetic construct
  REGION 1..447: note = CD33-Targeting IgG4 Antibody Heavy Chain
QVQLVQSGAEVKKPGASVKVSCKASGYTFTDYFMHWVRQAPGQGLEWMGWINPNSGNTGYAQKFQGRVTMTRDTSTSTVYMELSSLRSEDTAVYYCARLNDYGDYGGPATLDYWGQGTLVTVSSSTKGPSVFPLAPCSRSTSESTAALGCLVKDYFPEPVTVSWNSGALTSGVHTFPAVLQSSGLYSLSSVVTVPSSSLGTKTYTCNVDHKPSNTKVDKRVSKYGPPCPSCPPEFLGGPSVFLFPPKPKDTLMISRTPEVTCVVVDVSQEDPEVQFNWYVDGVEVHNAKTKPREEQFNSTYRVVSVLTVLHQDWLNGKEYKCKVSNKGLPSSIEKTISKAKQPREPQVYTLPPSQEEMTKNQVSLTCLVKGFYPSDIAVEWESNGQPENNYKTTPPVLDSDGSFFLYSRLTVDKSRWQEGNVFSCSVMHEALHNHYTQKSLSLSLGK

SEQ ID NO: 1845 - protein, 440 aa, synthetic construct
  REGION 1..440: note = CLL-1-Targeting IgG4 Antibody Heavy Chain
QVQLVQSGAEVKKPGASVKVSCKASGYTFTNYYMHWVRQAPGQGLEWLGWISPYSGDTKYAQTLQGRVTMTRDTSTSTVYMELSSLRSEDTAVYYCARESMDRLDYWGQGTLVTVSSSTKGPSVFPLAPCSRSTSESTAALGCLVKDYFPEPVTVSWNSGALTSGVHTFPAVLQSSGLYSLSSVVTVPSSSLGTKTYTCNVDHKPSNTKVDKRVSKYGPPCPSCPPEFLGGPSVFLFPPKPKDTLMISRTPEVTCVVVDVSQEDPEVQFNWYVDGVEVHNAKTKPREEQFNSTYRVVSVLTVLHQDWLNGKEYKCKVSNKGLPSSIEKTISKAKQPREPQVYTLPPSQEEMTKNQVSLTCLVKGFYPSDIAVEWESNGQPENNYKTTPPVLDSDGSFFLYSRLTVDKSRWQEGNVFSCSVMHEALHNHYTQKSLSLSLGK

SEQ ID NO: 1846 - protein, 445 aa, synthetic construct
  REGION 1..445: note = CLL-1-Targeting IgG4 Antibody Heavy Chain
EVQLLESGGGLVQPGGSLRLSCAASGFTFSSYAMHWVRQAPGKGLEWVADISGSGGLTYYADSVKGRFTISRDNSKNTLYLQMNSLRAEDTAVYYCAREGDQYSSSSFFDYWGQGTLVTVSSSTKGPSVFPLAPCSRSTSESTAALGCLVKDYFPEPVTVSWNSGALTSGVHTFPAVLQSSGLYSLSSVVTVPSSSLGTKTYTCNVDHKPSNTKVDKRVSKYGPPCPSCPPEFLGGPSVFLFPPKPKDTLMISRTPEVTCVVVDVSQEDPEVQFNWYVDGVEVHNAKTKPREEQFNSTYRVVSVLTVLHQDWLNGKEYKCKVSNKGLPSSIEKTISKAKQPREPQVYTLPPSQEEMTKNQVSLTCLVKGFYPSDIAVEWESNGQPENNYKTTPPVLDSDGSFFLYSRLTVDKSRWQEGNVFSCSVMHEALHNHYTQKSLSLSLGK

SEQ ID NO: 1847 - protein, 441 aa, synthetic construct
  REGION 1..441: note = CLL-1-Targeting IgG4 Antibody Heavy Chain
EVQLVESGGGLVKPGGSLRLSCAASGFTFDEFGMNWVRQAPGKGLEWISYISGDSGYTNCADSVKGRFTISRDDSKNTLYLQMNSLKTEDTAVYYCAAGYGGYYFDYWGQGTLVTVSSSTKGPSVFPLAPCSRSTSESTAALGCLVKDYFPEPVTVSWNSGALTSGVHTFPAVLQSSGLYSLSSVVTVPSSSLGTKTYTCNVDHKPSNTKVDKRVSKYGPPCPSCPPEFLGGPSVFLFPPKPKDTLMISRTPEVTCVVVDVSQEDPEVQFNWYVDGVEVHNAKTKPREEQFNSTYRVVSVLTVLHQDWLNGKEYKCKVSNKGLPSSIEKTISKAKQPREPQVYTLPPSQEEMTKNQVSLTCLVKGFYPSDIAVEWESNGQPENNYKTTPPVLDSDGSFFLYSRLTVDKSRWQEGNVFSCSVMHEALHNHYTQKSLSLSLGK

SEQ ID NO: 1848 - protein, 444 aa, synthetic construct
  REGION 1..444: note = CLL-1-Targeting IgG4 Antibody Heavy Chain
QVQLVQSGAEVKKPGASVKVSCKASGYTFTSYYMHWVRQAPGQGLEWMGMINPSAGSTSYAQKFQGRVTMTRDTSTSTVYMELSSLRSEDTAVYYCASVDSSGWYAPFDYWGQGTLVTVSSSTKGPSVFPLAPCSRSTSESTAALGCLVKDYFPEPVTVSWNSGALTSGVHTFPAVLQSSGLYSLSSVVTVPSSSLGTKTYTCNVDHKPSNTKVDKRVSKYGPPCPSCPPEFLGGPSVFLFPPKPKDTLMISRTPEVTCVVVDVSQEDPEVQFNWYVDGVEVHNAKTKPREEQFNSTYRVVSVLTVLHQDWLNGKEYKCKVSNKGLPSSIEKTISKAKQPREPQVYTLPPSQEEMTKNQVSLTCLVKGFYPSDIAVEWESNGQPENNYKTTPPVLDSDGSFFLYSRLTVDKSRWQEGNVFSCSVMHEALHNHYTQKSLSLSLGK

SEQ ID NO: 1849 - protein, 449 aa, synthetic construct
  REGION 1..449: note = CLL-1-Targeting IgG4 Antibody Heavy Chain
EVQLLESGGGLVQPGGSLRLSCAASGFTFDEYAMHWVRQAPGKGLEWVSAIGAGGSTYYADSVKGRFTISRDNSKNTLYLQMNSLRAEDTAVYYCASSLGPELRGVDYYYYGMDVWGQGTTVTVSSSTKGPSVFPLAPCSRSTSESTAALGCLVKDYFPEPVTVSWNSGALTSGVHTFPAVLQSSGLYSLSSVVTVPSSSLGTKTYTCNVDHKPSNTKVDKRVSKYGPPCPSCPPEFLGGPSVFLFPPKPKDTLMISRTPEVTCVVVDVSQEDPEVQFNWYVDGVEVHNAKTKPREEQFNSTYRVVSVLTVLHQDWLNGKEYKCKVSNKGLPSSIEKTISKAKQPREPQVYTLPPSQEEMTKNQVSLTCLVKGFYPSDIAVEWESNGQPENNYKTTPPVLDSDGSFFLYSRLTVDKSRWQEGNVFSCSVMHEALHNHYTQKSLSLSLGK

SEQ ID NO: 1850 - protein, 436 aa, synthetic construct
  REGION 1..436: note = CLL-1-Targeting IgG4 Antibody Heavy Chain
EVQLLESGGGLVQPGGSLRLSCAASGFNFDDYAMHWVRQAPGKGLEWVSVIYSGGSTYYADSVKGRFTISRDNSKNTLYLQMNSLRAEDTAVYYCTRHDFDYWGQGTLVTVSSSTKGPSVFPLAPCSRSTSESTAALGCLVKDYFPEPVTVSWNSGALTSGVHTFPAVLQSSGLYSLSSVVTVPSSSLGTKTYTCNVDHKPSNTKVDKRVSKYGPPCPSCPPEFLGGPSVFLFPPKPKDTLMISRTPEVTCVVVDVSQEDPEVQFNWYVDGVEVHNAKTKPREEQFNSTYRVVSVLTVLHQDWLNGKEYKCKVSNKGLPSSIEKTISKAKQPREPQVYTLPPSQEEMTKNQVSLTCLVKGFYPSDIAVEWESNGQPENNYKTTPPVLDSDGSFFLYSRLTVDKSRWQEGNVFSCSVMHEALHNHYTQKSLSLSLGK

SEQ ID NO: 1851 - protein, 440 aa, synthetic construct
  REGION 1..440: note = CLL-1-Targeting IgG4 Antibody Heavy Chain
EVQLVESGGGLVKPGGSLRLSCAASGFTFSDYALHWVRQAPGKGLEWVSLISGDGGSTYYADSVKGRFTISRDDSKNTLYLQMNSLKTEDTAVYYCARDLGGERSYWGQGTLVTVSSSTKGPSVFPLAPCSRSTSESTAALGCLVKDYFPEPVTVSWNSGALTSGVHTFPAVLQSSGLYSLSSVVTVPSSSLGTKTYTCNVDHKPSNTKVDKRVSKYGPPCPSCPPEFLGGPSVFLFPPKPKDTLMISRTPEVTCVVVDVSQEDPEVQFNWYVDGVEVHNAKTKPREEQFNSTYRVVSVLTVLHQDWLNGKEYKCKVSNKGLPSSIEKTISKAKQPREPQVYTLPPSQEEMTKNQVSLTCLVKGFYPSDIAVEWESNGQPENNYKTTPPVLDSDGSFFLYSRLTVDKSRWQEGNVFSCSVMHEALHNHYTQKSLSLSLGK

SEQ ID NO: 1852 - protein, 447 aa, synthetic construct
  REGION 1..447: note = CLL-1-Targeting IgG4 Antibody Heavy Chain
QVQLVQSGAEVKKPGASVKVSCKASGYTFTDYYMHWVRQAPGQGLEWMGIINPSDGSTTYAQSFQGRVTMTRDTSTSTVYMELSSLRSEDTAVYYCARDELPDSSGWYGYFQHWGQGTLVTVSSSTKGPSVFPLAPCSRSTSESTAALGCLVKDYFPEPVTVSWNSGALTSGVHTFPAVLQSSGLYSLSSVVTVPSSSLGTKTYTCNVDHKPSNTKVDKRVSKYGPPCPSCPPEFLGGPSVFLFPPKPKDTLMISRTPEVTCVVVDVSQEDPEVQFNWYVDGVEVHNAKTKPREEQFNSTYRVVSVLTVLHQDWLNGKEYKCKVSNKGLPSSIEKTISKAKQPREPQVYTLPPSQEEMTKNQVSLTCLVKGFYPSDIAVEWESNGQPENNYKTTPPVLDSDGSFFLYSRLTVDKSRWQEGNVFSCSVMHEALHNHYTQKSLSLSLGK

SEQ ID NO: 1853 - protein, 441 aa, synthetic construct
  REGION 1..441: note = CLL-1-Targeting IgG4 Antibody Heavy Chain
QVQLVQSGAEVKKPGSSVKVSCKASGGTFSSYAISWVRQAPGQGLEWMGEIIPFFGTANYAQKFQGRVTITADESTSTAYMELSSLRSEDTAVYYCARAEYGGDLDYWGQGTLVTVSSSTKGPSVFPLAPCSRSTSESTAALGCLVKDYFPEPVTVSWNSGALTSGVHTFPAVLQSSGLYSLSSVVTVPSSSLGTKTYTCNVDHKPSNTKVDKRVSKYGPPCPSCPPEFLGGPSVFLFPPKPKDTLMISRTPEVTCVVVDVSQEDPEVQFNWYVDGVEVHNAKTKPREEQFNSTYRVVSVLTVLHQDWLNGKEYKCKVSNKGLPSSIEKTISKAKQPREPQVYTLPPSQEEMTKNQVSLTCLVKGFYPSDIAVEWESNGQPENNYKTTPPVLDSDGSFFLYSRLTVDKSRWQEGNVFSCSVMHEALHNHYTQKSLSLSLGK

SEQ ID NO: 1854 - protein, 445 aa, synthetic construct
  REGION 1..445: note = CLL-1-Targeting IgG4 Antibody Heavy Chain
QVQLVQSGAEVKKPGASVKVSCKASGDTFTRHYVHWVRQAPGQGLEWMGIINPRGGTHYAQKFQGRVTMTRDTSTSTVYMELSSLRSEDTAVYYCARRDCSGGSCYSDLDYWGQGTLVTVSSSTKGPSVFPLAPCSRSTSESTAALGCLVKDYFPEPVTVSWNSGALTSGVHTFPAVLQSSGLYSLSSVVTVPSSSLGTKTYTCNVDHKPSNTKVDKRVSKYGPPCPSCPPEFLGGPSVFLFPPKPKDTLMISRTPEVTCVVVDVSQEDPEVQFNWYVDGVEVHNAKTKPREEQFNSTYRVVSVLTVLHQDWLNGKEYKCKVSNKGLPSSIEKTISKAKQPREPQVYTLPPSQEEMTKNQVSLTCLVKGFYPSDIAVEWESNGQPENNYKTTPPVLDSDGSFFLYSRLTVDKSRWQEGNVFSCSVMHEALHNHYTQKSLSLSLGK

SEQ ID NO: 1855 - protein, 440 aa, synthetic construct
  REGION 1..440: note = CLL-1-Targeting IgG4 Antibody Heavy Chain
QVQLVQSGAEVKKPGASVKVSCKASGGTFSSYAISWVRQAPGQGLEWMGWINPDSGDASYARKFQGRVTMTRDTSTSTVYMELSSLRSEDTAVYYCATFGEEAFDIWGQGTMVTVSSSTKGPSVFPLAPCSRSTSESTAALGCLVKDYFPEPVTVSWNSGALTSGVHTFPAVLQSSGLYSLSSVVTVPSSSLGTKTYTCNVDHKPSNTKVDKRVSKYGPPCPSCPPEFLGGPSVFLFPPKPKDTLMISRTPEVTCVVVDVSQEDPEVQFNWYVDGVEVHNAKTKPREEQFNSTYRVVSVLTVLHQDWLNGKEYKCKVSNKGLPSSIEKTISKAKQPREPQVYTLPPSQEEMTKNQVSLTCLVKGFYPSDIAVEWESNGQPENNYKTTPPVLDSDGSFFLYSRLTVDKSRWQEGNVFSCSVMHEALHNHYTQKSLSLSLGK

SEQ ID NO: 1856 - protein, 446 aa, synthetic construct
  REGION 1..446: note = CLL-1-Targeting IgG4 Antibody Heavy Chain
QVQLVQSGAEVKKPGASVKVSCKASGGTFSSYAISWVRQAPGQGLEWMGWIDPKNGDTNYAQKFQGRVTMTRDTSTSTVYMELSSLRSEDTAVYYCATEGSHHPYYYYGMDVWGQGTTVTVSSSTKGPSVFPLAPCSRSTSESTAALGCLVKDYFPEPVTVSWNSGALTSGVHTFPAVLQSSGLYSLSSVVTVPSSSLGTKTYTCNVDHKPSNTKVDKRVSKYGPPCPSCPPEFLGGPSVFLFPPKPKDTLMISRTPEVTCVVVDVSQEDPEVQFNWYVDGVEVHNAKTKPREEQFNSTYRVVSVLTVLHQDWLNGKEYKCKVSNKGLPSSIEKTISKAKQPREPQVYTLPPSQEEMTKNQVSLTCLVKGFYPSDIAVEWESNGQPENNYKTTPPVLDSDGSFFLYSRLTVDKSRWQEGNVFSCSVMHEALHNHYTQKSLSLSLGK

SEQ ID NO: 1857 - protein, 449 aa, synthetic construct
  REGION 1..449: note = CLL-1-Targeting IgG4 Antibody Heavy Chain
QVQLVQSGAEVKKPGASVKVSCKASGYTFTGYHMHWVRQAPGQGLEWMGWINPNTGGTNYAQKFQGRVTMTRDTSTSTVYMELSSLRSEDTAVYYCARPNTAMVPPYYYYYGMDVWGQGTLVTVSSSTKGPSVFPLAPCSRSTSESTAALGCLVKDYFPEPVTVSWNSGALTSGVHTFPAVLQSSGLYSLSSVVTVPSSSLGTKTYTCNVDHKPSNTKVDKRVSKYGPPCPSCPPEFLGGPSVFLFPPKPKDTLMISRTPEVTCVVVDVSQEDPEVQFNWYVDGVEVHNAKTKPREEQFNSTYRVVSVLTVLHQDWLNGKEYKCKVSNKGLPSSIEKTISKAKQPREPQVYTLPPSQEEMTKNQVSLTCLVKGFYPSDIAVEWESNGQPENNYKTTPPVLDSDGSFFLYSRLTVDKSRWQEGNVFSCSVMHEALHNHYTQKSLSLSLGK

SEQ ID NO: 1858 - protein, 443 aa, synthetic construct
  REGION 1..443: note = CLL-1-Targeting IgG4 Antibody Heavy Chain
QVQLVQSGAEVKKPGASVKVSCKASGYTFTSYDINWVRQAPGQGLEWMGWMNPNSGNTGYAQKFQGRVTMTRDTSTSTVYMELSSLRSEDTAVYYCARVSATGTYGLDYWGQGTLVTVSSSTKGPSVFPLAPCSRSTSESTAALGCLVKDYFPEPVTVSWNSGALTSGVHTFPAVLQSSGLYSLSSVVTVPSSSLGTKTYTCNVDHKPSNTKVDKRVSKYGPPCPSCPPEFLGGPSVFLFPPKPKDTLMISRTPEVTCVVVDVSQEDPEVQFNWYVDGVEVHNAKTKPREEQFNSTYRVVSVLTVLHQDWLNGKEYKCKVSNKGLPSSIEKTISKAKQPREPQVYTLPPSQEEMTKNQVSLTCLVKGFYPSDIAVEWESNGQPENNYKTTPPVLDSDGSFFLYSRLTVDKSRWQEGNVFSCSVMHEALHNHYTQKSLSLSLGK

SEQ ID NO: 1859 - protein, 442 aa, synthetic construct
  REGION 1..442: note = CLL-1-Targeting IgG4 Antibody Heavy Chain
QVQLVQSGAEVKKPGASVKVSCKASGYTFNNYGITWVRQAPGQGLEWMGIINPITGVTTYAQNFQGRVTMTRDTSTSTVYMELSSLRSEDTAVYYCASGEQQLVLFDYWGQGTLVTVSSSTKGPSVFPLAPCSRSTSESTAALGCLVKDYFPEPVTVSWNSGALTSGVHTFPAVLQSSGLYSLSSVVTVPSSSLGTKTYTCNVDHKPSNTKVDKRVSKYGPPCPSCPPEFLGGPSVFLFPPKPKDTLMISRTPEVTCVVVDVSQEDPEVQFNWYVDGVEVHNAKTKPREEQFNSTYRVVSVLTVLHQDWLNGKEYKCKVSNKGLPSSIEKTISKAKQPREPQVYTLPPSQEEMTKNQVSLTCLVKGFYPSDIAVEWESNGQPENNYKTTPPVLDSDGSFFLYSRLTVDKSRWQEGNVFSCSVMHEALHNHYTQKSLSLSLGK

SEQ ID NO: 1860 - protein, 442 aa, synthetic construct
  REGION 1..442: note = CLL-1-Targeting IgG4 Antibody Heavy Chain
QVQLVQSGAEVKKPGASVKVSCKASGYTFTDYYLHWVRQAPGQGLEWMGWMNPNSGNTGYAQKFQGRVTMTRDTSTSTVYMELSSLRSEDTAVYYCAADVITAYGMDVWGQGTMVTVSSSTKGPSVFPLAPCSRSTSESTAALGCLVKDYFPEPVTVSWNSGALTSGVHTFPAVLQSSGLYSLSSVVTVPSSSLGTKTYTCNVDHKPSNTKVDKRVSKYGPPCPSCPPEFLGGPSVFLFPPKPKDTLMISRTPEVTCVVVDVSQEDPEVQFNWYVDGVEVHNAKTKPREEQFNSTYRVVSVLTVLHQDWLNGKEYKCKVSNKGLPSSIEKTISKAKQPREPQVYTLPPSQEEMTKNQVSLTCLVKGFYPSDIAVEWESNGQPENNYKTTPPVLDSDGSFFLYSRLTVDKSRWQEGNVFSCSVMHEALHNHYTQKSLSLSLGK

SEQ ID NO: 1861 - protein, 442 aa, synthetic construct
  REGION 1..442: note = CLL-1-Targeting IgG4 Antibody Heavy Chain
EVQLLESGGGLVQPGGSLRLSCAASGFTFSNAWMSWVRQAPGKGLEWVADISYDGTNDYYADSVKGRFTISRDNSKNTLYLQMNSLRAEDTAVYYCTTEELRFGGFDYWGQGTLVTVSSSTKGPSVFPLAPCSRSTSESTAALGCLVKDYFPEPVTVSWNSGALTSGVHTFPAVLQSSGLYSLSSVVTVPSSSLGTKTYTCNVDHKPSNTKVDKRVSKYGPPCPSCPPEFLGGPSVFLFPPKPKDTLMISRTPEVTCVVVDVSQEDPEVQFNWYVDGVEVHNAKTKPREEQFNSTYRVVSVLTVLHQDWLNGKEYKCKVSNKGLPSSIEKTISKAKQPREPQVYTLPPSQEEMTKNQVSLTCLVKGFYPSDIAVEWESNGQPENNYKTTPPVLDSDGSFFLYSRLTVDKSRWQEGNVFSCSVMHEALHNHYTQKSLSLSLGK

SEQ ID NO: 1862 - protein, 445 aa, synthetic construct
  REGION 1..445: note = CLL-1-Targeting IgG4 Antibody Heavy Chain
QVQLVQSGAEVKKPGSSVKVSCKASGGTFSSYAISWVRQAPGQGLEWMGGIIPMFGTANYAQKFQGRVTITADESTSTAYMELSSLRSEDTAVYYCARDLGYSNAGGTLHYWGQGTLVTVSSSTKGPSVFPLAPCSRSTSESTAALGCLVKDYFPEPVTVSWNSGALTSGVHTFPAVLQSSGLYSLSSVVTVPSSSLGTKTYTCNVDHKPSNTKVDKRVSKYGPPCPSCPPEFLGGPSVFLFPPKPKDTLMISRTPEVTCVVVDVSQEDPEVQFNWYVDGVEVHNAKTKPREEQFNSTYRVVSVLTVLHQDWLNGKEYKCKVSNKGLPSSIEKTISKAKQPREPQVYTLPPSQEEMTKNQVSLTCLVKGFYPSDIAVEWESNGQPENNYKTTPPVLDSDGSFFLYSRLTVDKSRWQEGNVFSCSVMHEALHNHYTQKSLSLSLGK

SEQ ID NO: 1863 - protein, 445 aa, synthetic construct
  REGION 1..445: note = CLL-1-Targeting IgG4 Antibody Heavy Chain
QVQLVQSGAEVKKPGASVKVSCKASGYTFTNYYMHWVRQAPGQGLEWMGIINPSGGSTSYAQKFQGRVTMTRDTSTSTVYMELSSLRSEDTAVYYCARAEWDILTGYYIDYWGQGTLVTVSSSTKGPSVFPLAPCSRSTSESTAALGCLVKDYFPEPVTVSWNSGALTSGVHTFPAVLQSSGLYSLSSVVTVPSSSLGTKTYTCNVDHKPSNTKVDKRVSKYGPPCPSCPPEFLGGPSVFLFPPKPKDTLMISRTPEVTCVVVDVSQEDPEVQFNWYVDGVEVHNAKTKPREEQFNSTYRVVSVLTVLHQDWLNGKEYKCKVSNKGLPSSIEKTISKAKQPREPQVYTLPPSQEEMTKNQVSLTCLVKGFYPSDIAVEWESNGQPENNYKTTPPVLDSDGSFFLYSRLTVDKSRWQEGNVFSCSVMHEALHNHYTQKSLSLSLGK

SEQ ID NO: 1864 - protein, 441 aa, synthetic construct
  REGION 1..441: note = CLL-1-Targeting IgG4 Antibody Heavy Chain
QVQLVQSGAEVKKPGASVKVSCKASGYTFTDHFVHWVRQAPGQGLEWMGWISAYNGNTNYAQKFQGRVTMTRDTSTSTVYMELSSLRSEDTAVYYCARAEYSYGFDYWGQGTLVTVSSSTKGPSVFPLAPCSRSTSESTAALGCLVKDYFPEPVTVSWNSGALTSGVHTFPAVLQSSGLYSLSSVVTVPSSSLGTKTYTCNVDHKPSNTKVDKRVSKYGPPCPSCPPEFLGGPSVFLFPPKPKDTLMISRTPEVTCVVVDVSQEDPEVQFNWYVDGVEVHNAKTKPREEQFNSTYRVVSVLTVLHQDWLNGKEYKCKVSNKGLPSSIEKTISKAKQPREPQVYTLPPSQEEMTKNQVSLTCLVKGFYPSDIAVEWESNGQPENNYKTTPPVLDSDGSFFLYSRLTVDKSRWQEGNVFSCSVMHEALHNHYTQKSLSLSLGK

SEQ ID NO: 1865 - protein, 444 aa, synthetic construct
  REGION 1..444: note = CLL-1-Targeting IgG4 Antibody Heavy Chain
QVQLVQSGAEVKKPGASVKVSCKASGYTFTGYYVHWVRQAPGQGLEWMGVINPSGGGSPSYAQKFQGRVTMTRDTSTSTVYMELSSLRSEDTAVYYCARDRSDVDYGMDVWGQGTTVTVSSSTKGPSVFPLAPCSRSTSESTAALGCLVKDYFPEPVTVSWNSGALTSGVHTFPAVLQSSGLYSLSSVVTVPSSSLGTKTYTCNVDHKPSNTKVDKRVSKYGPPCPSCPPEFLGGPSVFLFPPKPKDTLMISRTPEVTCVVVDVSQEDPEVQFNWYVDGVEVHNAKTKPREEQFNSTYRVVSVLTVLHQDWLNGKEYKCKVSNKGLPSSIEKTISKAKQPREPQVYTLPPSQEEMTKNQVSLTCLVKGFYPSDIAVEWESNGQPENNYKTTPPVLDSDGSFFLYSRLTVDKSRWQEGNVFSCSVMHEALHNHYTQKSLSLSLGK

SEQ ID NO: 1866 - protein, 443 aa, synthetic construct
  REGION 1..443: note = CLL-1-Targeting IgG4 Antibody Heavy Chain
QVQLVQSGAEVKKPGASVKVSCKASGYTFTDYYMHWVRQAPGQGLEWMGLIDPSGGSTNSLQKFQGRVTMTRDTSTSTVYMELSSLRSEDTAVYYCARDVGFGELSFDIWGQGTTVTVSSSTKGPSVFPLAPCSRSTSESTAALGCLVKDYFPEPVTVSWNSGALTSGVHTFPAVLQSSGLYSLSSVVTVPSSSLGTKTYTCNVDHKPSNTKVDKRVSKYGPPCPSCPPEFLGGPSVFLFPPKPKDTLMISRTPEVTCVVVDVSQEDPEVQFNWYVDGVEVHNAKTKPREEQFNSTYRVVSVLTVLHQDWLNGKEYKCKVSNKGLPSSIEKTISKAKQPREPQVYTLPPSQEEMTKNQVSLTCLVKGFYPSDIAVEWESNGQPENNYKTTPPVLDSDGSFFLYSRLTVDKSRWQEGNVFSCSVMHEALHNHYTQKSLSLSLGK

SEQ ID NO: 1867 - protein, 447 aa, synthetic construct
  REGION 1..447: note = CLL-1-Targeting IgG4 Antibody Heavy Chain
QVQLVQSGAEVKKPGASVKVSCKASGYTFTGYYMHWVRQAPGQGLEWMGWINPNSGGTNYAQKFQGRVTMTRDTSTSTVYMELSSLRSEDTAVYYCAREIGGYDNYYYYGMDVWGQGTTVTVSSSTKGPSVFPLAPCSRSTSESTAALGCLVKDYFPEPVTVSWNSGALTSGVHTFPAVLQSSGLYSLSSVVTVPSSSLGTKTYTCNVDHKPSNTKVDKRVSKYGPPCPSCPPEFLGGPSVFLFPPKPKDTLMISRTPEVTCVVVDVSQEDPEVQFNWYVDGVEVHNAKTKPREEQFNSTYRVVSVLTVLHQDWLNGKEYKCKVSNKGLPSSIEKTISKAKQPREPQVYTLPPSQEEMTKNQVSLTCLVKGFYPSDIAVEWESNGQPENNYKTTPPVLDSDGSFFLYSRLTVDKSRWQEGNVFSCSVMHEALHNHYTQKSLSLSLGK

SEQ ID NO: 1868 - protein, 441 aa, synthetic construct
  REGION 1..441: note = CLL-1-Targeting IgG4 Antibody Heavy Chain
QVQLVQSGAEVKKPGASVKVSCKASGYTFNTYYMHWVRQAPGQGLEWMGWMHPNTGNTGYAQKFQGRVTMTRDTSTSTVYMELSSLRSEDTAVYYCARGTTSDAFDIWGQGTMVTVSSSTKGPSVFPLAPCSRSTSESTAALGCLVKDYFPEPVTVSWNSGALTSGVHTFPAVLQSSGLYSLSSVVTVPSSSLGTKTYTCNVDHKPSNTKVDKRVSKYGPPCPSCPPEFLGGPSVFLFPPKPKDTLMISRTPEVTCVVVDVSQEDPEVQFNWYVDGVEVHNAKTKPREEQFNSTYRVVSVLTVLHQDWLNGKEYKCKVSNKGLPSSIEKTISKAKQPREPQVYTLPPSQEEMTKNQVSLTCLVKGFYPSDIAVEWESNGQPENNYKTTPPVLDSDGSFFLYSRLTVDKSRWQEGNVFSCSVMHEALHNHYTQKSLSLSLGK

SEQ ID NO: 1869 - protein, 449 aa, synthetic construct
  REGION 1..449: note = CLL-1-Targeting IgG4 Antibody Heavy Chain
QVQLVQSGAEVKKPGASVKVSCKASGDTFTRHYVHWVRQAPGQGLEWMGRVNPRDGRTNSAQKFQGRVTMTRDTSTSTVYMELSSLRSEDTAVYYCAKDMFPTVTGTYYYYGMDVWGQGTTVTVSSSTKGPSVFPLAPCSRSTSESTAALGCLVKDYFPEPVTVSWNSGALTSGVHTFPAVLQSSGLYSLSSVVTVPSSSLGTKTYTCNVDHKPSNTKVDKRVSKYGPPCPSCPPEFLGGPSVFLFPPKPKDTLMISRTPEVTCVVVDVSQEDPEVQFNWYVDGVEVHNAKTKPREEQFNSTYRVVSVLTVLHQDWLNGKEYKCKVSNKGLPSSIEKTISKAKQPREPQVYTLPPSQEEMTKNQVSLTCLVKGFYPSDIAVEWESNGQPENNYKTTPPVLDSDGSFFLYSRLTVDKSRWQEGNVFSCSVMHEALHNHYTQKSLSLSLGK

SEQ ID NO: 1870 - protein, 442 aa, synthetic construct
  REGION 1..442: note = CLL-1-Targeting IgG4 Antibody Heavy Chain
QVQLVQSGAEVKKPGASVKVSCKASGYTFSSYDINWVRQAPGQGLEWVGWINPRNGGTDYAQKFQGRVTMTRDTSTSTVYMELSSLRSEDTAVYYCARHRWELDSFDYWGQGTLVTVSSSTKGPSVFPLAPCSRSTSESTAALGCLVKDYFPEPVTVSWNSGALTSGVHTFPAVLQSSGLYSLSSVVTVPSSSLGTKTYTCNVDHKPSNTKVDKRVSKYGPPCPSCPPEFLGGPSVFLFPPKPKDTLMISRTPEVTCVVVDVSQEDPEVQFNWYVDGVEVHNAKTKPREEQFNSTYRVVSVLTVLHQDWLNGKEYKCKVSNKGLPSSIEKTISKAKQPREPQVYTLPPSQEEMTKNQVSLTCLVKGFYPSDIAVEWESNGQPENNYKTTPPVLDSDGSFFLYSRLTVDKSRWQEGNVFSCSVMHEALHNHYTQKSLSLSLGK

SEQ ID NO: 1871 - protein, 442 aa, synthetic construct
  REGION 1..442: note = CLL-1-Targeting IgG4 Antibody Heavy Chain
QVQLVQSGAEVKKPGASVKVSCKASGYTFTSYYIHWVRQAPGQGLEWMGWMNPNDGKTAYAQRFQGRVTMTRDTSTSTVYMELSSLRSEDTAVYYCARDDDYGGYVAYWGQGTLVTVSSSTKGPSVFPLAPCSRSTSESTAALGCLVKDYFPEPVTVSWNSGALTSGVHTFPAVLQSSGLYSLSSVVTVPSSSLGTKTYTCNVDHKPSNTKVDKRVSKYGPPCPSCPPEFLGGPSVFLFPPKPKDTLMISRTPEVTCVVVDVSQEDPEVQFNWYVDGVEVHNAKTKPREEQFNSTYRVVSVLTVLHQDWLNGKEYKCKVSNKGLPSSIEKTISKAKQPREPQVYTLPPSQEEMTKNQVSLTCLVKGFYPSDIAVEWESNGQPENNYKTTPPVLDSDGSFFLYSRLTVDKSRWQEGNVFSCSVMHEALHNHYTQKSLSLSLGK

SEQ ID NO: 1872 - protein, 439 aa, synthetic construct
  REGION 1..439: note = CLL-1-Targeting IgG4 Antibody Heavy Chain
EVQLLESGGGLVQPGGSLRLSCAASGMSVTSNHMSWVRQAPGKGLEWVSSIYPDGKTYYADSVKGRFTISRDNSKNTLYLQMNSLRAEDTAVYYCARDEEDWFDPWGQGTLVTVSSSTKGPSVFPLAPCSRSTSESTAALGCLVKDYFPEPVTVSWNSGALTSGVHTFPAVLQSSGLYSLSSVVTVPSSSLGTKTYTCNVDHKPSNTKVDKRVSKYGPPCPSCPPEFLGGPSVFLFPPKPKDTLMISRTPEVTCVVVDVSQEDPEVQFNWYVDGVEVHNAKTKPREEQFNSTYRVVSVLTVLHQDWLNGKEYKCKVSNKGLPSSIEKTISKAKQPREPQVYTLPPSQEEMTKNQVSLTCLVKGFYPSDIAVEWESNGQPENNYKTTPPVLDSDGSFFLYSRLTVDKSRWQEGNVFSCSVMHEALHNHYTQKSLSLSLGK

SEQ ID NO: 1873 - protein, 442 aa, synthetic construct
  REGION 1..442: note = CLL-1-Targeting IgG4 Antibody Heavy Chain
EVQLLESGGGLVQPGGSLRLSCAASGFTFSNHYMSWVRQAPGKGLEWVAVIWPDGSKEYYADSVKGRFTISRDNSKNTLYLQMNSLRAEDTAVYYCAREDYYGSGMDYWGQGTLVTVSSSTKGPSVFPLAPCSRSTSESTAALGCLVKDYFPEPVTVSWNSGALTSGVHTFPAVLQSSGLYSLSSVVTVPSSSLGTKTYTCNVDHKPSNTKVDKRVSKYGPPCPSCPPEFLGGPSVFLFPPKPKDTLMISRTPEVTCVVVDVSQEDPEVQFNWYVDGVEVHNAKTKPREEQFNSTYRVVSVLTVLHQDWLNGKEYKCKVSNKGLPSSIEKTISKAKQPREPQVYTLPPSQEEMTKNQVSLTCLVKGFYPSDIAVEWESNGQPENNYKTTPPVLDSDGSFFLYSRLTVDKSRWQEGNVFSCSVMHEALHNHYTQKSLSLSLGK

SEQ ID NO: 1874 - protein, 438 aa, synthetic construct
  REGION 1..438: note = CLL-1-Targeting IgG4 Antibody Heavy Chain
QVQLVQSGAEVKKPGASVKVSCKASGGTFSNYAISWVRQAPGQGLEWMGWISAYNGNSDYAQNLQGRVTMTRDTSTSTVYMELSSLRSEDTAVYYCAIGDYFDYWGQGTLVTVSSSTKGPSVFPLAPCSRSTSESTAALGCLVKDYFPEPVTVSWNSGALTSGVHTFPAVLQSSGLYSLSSVVTVPSSSLGTKTYTCNVDHKPSNTKVDKRVSKYGPPCPSCPPEFLGGPSVFLFPPKPKDTLMISRTPEVTCVVVDVSQEDPEVQFNWYVDGVEVHNAKTKPREEQFNSTYRVVSVLTVLHQDWLNGKEYKCKVSNKGLPSSIEKTISKAKQPREPQVYTLPPSQEEMTKNQVSLTCLVKGFYPSDIAVEWESNGQPENNYKTTPPVLDSDGSFFLYSRLTVDKSRWQEGNVFSCSVMHEALHNHYTQKSLSLSLGK

SEQ ID NO: 1875 - protein, 441 aa, synthetic construct
  REGION 1..441: note = CLL-1-Targeting IgG4 Antibody Heavy Chain
EVQLLESGGGLVQPGGSLRLSCAASGFTVSSNYMSWVRQAPGKGLEWVAVIYSDGKTYYADSVKGRFTISRDNSKNTLYLQMNSLRAEDTAVYYCAREDSSGSHFDYWGQGTLVTVSSSTKGPSVFPLAPCSRSTSESTAALGCLVKDYFPEPVTVSWNSGALTSGVHTFPAVLQSSGLYSLSSVVTVPSSSLGTKTYTCNVDHKPSNTKVDKRVSKYGPPCPSCPPEFLGGPSVFLFPPKPKDTLMISRTPEVTCVVVDVSQEDPEVQFNWYVDGVEVHNAKTKPREEQFNSTYRVVSVLTVLHQDWLNGKEYKCKVSNKGLPSSIEKTISKAKQPREPQVYTLPPSQEEMTKNQVSLTCLVKGFYPSDIAVEWESNGQPENNYKTTPPVLDSDGSFFLYSRLTVDKSRWQEGNVFSCSVMHEALHNHYTQKSLSLSLGK

SEQ ID NO: 1876 - protein, 443 aa, synthetic construct
  REGION 1..443: note = CLL-1-Targeting IgG4 Antibody Heavy Chain
QVQLVQSGAEVKKPGSSVKVSCKASGYTFTKYEINWVRQAPGQGLEWMGGIIPIFGTANYAQKFQGRVTITADESTSTAYMELSSLRSEDTAVYYCARGSGWYTPLFDYWGQGTLVTVSSSTKGPSVFPLAPCSRSTSESTAALGCLVKDYFPEPVTVSWNSGALTSGVHTFPAVLQSSGLYSLSSVVTVPSSSLGTKTYTCNVDHKPSNTKVDKRVSKYGPPCPSCPPEFLGGPSVFLFPPKPKDTLMISRTPEVTCVVVDVSQEDPEVQFNWYVDGVEVHNAKTKPREEQFNSTYRVVSVLTVLHQDWLNGKEYKCKVSNKGLPSSIEKTISKAKQPREPQVYTLPPSQEEMTKNQVSLTCLVKGFYPSDIAVEWESNGQPENNYKTTPPVLDSDGSFFLYSRLTVDKSRWQEGNVFSCSVMHEALHNHYTQKSLSLSLGK

SEQ ID NO: 1877 - protein, 444 aa, synthetic construct
  REGION 1..444: note = CLL-1-Targeting IgG4 Antibody Heavy Chain
QVQLVQSGAEVKKPGASVKVSCKASGYTFTDYYIHWVRQAPGQGLEWMGLIDPSGGSTSIAQKFQGRVTMTRDTSTSTVYMELSSLRSEDTAVYYCARDYDILTGSGFDPWGQGTLVTVSSSTKGPSVFPLAPCSRSTSESTAALGCLVKDYFPEPVTVSWNSGALTSGVHTFPAVLQSSGLYSLSSVVTVPSSSLGTKTYTCNVDHKPSNTKVDKRVSKYGPPCPSCPPEFLGGPSVFLFPPKPKDTLMISRTPEVTCVVVDVSQEDPEVQFNWYVDGVEVHNAKTKPREEQFNSTYRVVSVLTVLHQDWLNGKEYKCKVSNKGLPSSIEKTISKAKQPREPQVYTLPPSQEEMTKNQVSLTCLVKGFYPSDIAVEWESNGQPENNYKTTPPVLDSDGSFFLYSRLTVDKSRWQEGNVFSCSVMHEALHNHYTQKSLSLSLGK

SEQ ID NO: 1878 - protein, 445 aa, synthetic construct
  REGION 1..445: note = CLL-1-Targeting IgG4 Antibody Heavy Chain
QVQLVQSGAEVKKPGASVKVSCKASGYTFTTYYMHWVRQAPGQGLEWMGIINVSAGTTSYAQKFQGRVTMTRDTSTSTVYMELSSLRSEDTAVYYCAKEPYPHQSGWFFDYWGQGTLVTVSSSTKGPSVFPLAPCSRSTSESTAALGCLVKDYFPEPVTVSWNSGALTSGVHTFPAVLQSSGLYSLSSVVTVPSSSLGTKTYTCNVDHKPSNTKVDKRVSKYGPPCPSCPPEFLGGPSVFLFPPKPKDTLMISRTPEVTCVVVDVSQEDPEVQFNWYVDGVEVHNAKTKPREEQFNSTYRVVSVLTVLHQDWLNGKEYKCKVSNKGLPSSIEKTISKAKQPREPQVYTLPPSQEEMTKNQVSLTCLVKGFYPSDIAVEWESNGQPENNYKTTPPVLDSDGSFFLYSRLTVDKSRWQEGNVFSCSVMHEALHNHYTQKSLSLSLGK

SEQ ID NO: 1879 - protein, 441 aa, synthetic construct
  REGION 1..441: note = CLL-1-Targeting IgG4 Antibody Heavy Chain
QVQLVQSGAEVKKPGASVKVSCKASGYTFTGHYMHWVRQAPGQGLEWMGWISTDNGNANYAQKFQGRVTMTRDTSTSTVYMELSSLRSEDTAVYYCARDTADYYFDYWGQGTLVTVSSSTKGPSVFPLAPCSRSTSESTAALGCLVKDYFPEPVTVSWNSGALTSGVHTFPAVLQSSGLYSLSSVVTVPSSSLGTKTYTCNVDHKPSNTKVDKRVSKYGPPCPSCPPEFLGGPSVFLFPPKPKDTLMISRTPEVTCVVVDVSQEDPEVQFNWYVDGVEVHNAKTKPREEQFNSTYRVVSVLTVLHQDWLNGKEYKCKVSNKGLPSSIEKTISKAKQPREPQVYTLPPSQEEMTKNQVSLTCLVKGFYPSDIAVEWESNGQPENNYKTTPPVLDSDGSFFLYSRLTVDKSRWQEGNVFSCSVMHEALHNHYTQKSLSLSLGK

SEQ ID NO: 1880 - protein, 440 aa, synthetic construct
  REGION 1..440: note = CLL-1-Targeting IgG4 Antibody Heavy Chain
QVQLVQSGAEVKKPGSSVKVSCKASGGTFSRYPFSWVRQAPGQGLEWMGWMNPNNGDTGYAQKFQGRVTITADESTSTAYMELSSLRSEDTAVYYCARGDYPYMDVWGKGTTVTVSSSTKGPSVFPLAPCSRSTSESTAALGCLVKDYFPEPVTVSWNSGALTSGVHTFPAVLQSSGLYSLSSVVTVPSSSLGTKTYTCNVDHKPSNTKVDKRVSKYGPPCPSCPPEFLGGPSVFLFPPKPKDTLMISRTPEVTCVVVDVSQEDPEVQFNWYVDGVEVHNAKTKPREEQFNSTYRVVSVLTVLHQDWLNGKEYKCKVSNKGLPSSIEKTISKAKQPREPQVYTLPPSQEEMTKNQVSLTCLVKGFYPSDIAVEWESNGQPENNYKTTPPVLDSDGSFFLYSRLTVDKSRWQEGNVFSCSVMHEALHNHYTQKSLSLSLGK

SEQ ID NO: 1881 - protein, 440 aa, synthetic construct
  REGION 1..440: note = CLL-1-Targeting IgG4 Antibody Heavy Chain
QVQLVQSGAEVKKPGASVKVSCKASGYTFTSDYMHWVRQAPGQGLEWMGWMNPNSGGTNYAQKFQGRVTMTRDTSTSTVYMELSSLRSEDTAVYYCARDYITGPSDWGQGTLVTVSSSTKGPSVFPLAPCSRSTSESTAALGCLVKDYFPEPVTVSWNSGALTSGVHTFPAVLQSSGLYSLSSVVTVPSSSLGTKTYTCNVDHKPSNTKVDKRVSKYGPPCPSCPPEFLGGPSVFLFPPKPKDTLMISRTPEVTCVVVDVSQEDPEVQFNWYVDGVEVHNAKTKPREEQFNSTYRVVSVLTVLHQDWLNGKEYKCKVSNKGLPSSIEKTISKAKQPREPQVYTLPPSQEEMTKNQVSLTCLVKGFYPSDIAVEWESNGQPENNYKTTPPVLDSDGSFFLYSRLTVDKSRWQEGNVFSCSVMHEALHNHYTQKSLSLSLGK

SEQ ID NO: 1882 - protein, 443 aa, synthetic construct
  REGION 1..443: note = CLL-1-Targeting IgG4 Antibody Heavy Chain
QVQLVQSGAEVKKPGASVKVSCKASGFTFTSYYMHWVRQAPGQGLEWMGWMNPNSGNTGYAQRFQGRVTMTRDTSTSTVYMELSSLRSEDTAVYYCARGHSRTDYGMDVWGQGTTVTVSSSTKGPSVFPLAPCSRSTSESTAALGCLVKDYFPEPVTVSWNSGALTSGVHTFPAVLQSSGLYSLSSVVTVPSSSLGTKTYTCNVDHKPSNTKVDKRVSKYGPPCPSCPPEFLGGPSVFLFPPKPKDTLMISRTPEVTCVVVDVSQEDPEVQFNWYVDGVEVHNAKTKPREEQFNSTYRVVSVLTVLHQDWLNGKEYKCKVSNKGLPSSIEKTISKAKQPREPQVYTLPPSQEEMTKNQVSLTCLVKGFYPSDIAVEWESNGQPENNYKTTPPVLDSDGSFFLYSRLTVDKSRWQEGNVFSCSVMHEALHNHYTQKSLSLSLGK

SEQ ID NO: 1883 - protein, 443 aa, synthetic construct
  REGION 1..443: note = CLL-1-Targeting IgG4 Antibody Heavy Chain
EVQLLESGGGLVQPGGSLRLSCAASGFTFSDHYMSWVRQAPGKGLEWVSIIYPDGKTYYADSVKGRFTISRDNSKNTLYLQMNSLRAEDTAVYYCAREGSYGDYDGMDVWGQGTTVTVSSSTKGPSVFPLAPCSRSTSESTAALGCLVKDYFPEPVTVSWNSGALTSGVHTFPAVLQSSGLYSLSSVVTVPSSSLGTKTYTCNVDHKPSNTKVDKRVSKYGPPCPSCPPEFLGGPSVFLFPPKPKDTLMISRTPEVTCVVVDVSQEDPEVQFNWYVDGVEVHNAKTKPREEQFNSTYRVVSVLTVLHQDWLNGKEYKCKVSNKGLPSSIEKTISKAKQPREPQVYTLPPSQEEMTKNQVSLTCLVKGFYPSDIAVEWESNGQPENNYKTTPPVLDSDGSFFLYSRLTVDKSRWQEGNVFSCSVMHEALHNHYTQKSLSLSLGK

SEQ ID NO: 1884 - protein, 442 aa, synthetic construct
  REGION 1..442: note = CLL-1-Targeting IgG4 Antibody Heavy Chain
QVQLVQSGAEVKKPGSSVKVSCKASGGTFSNYDISWVRQAPGQGLEWMGGIIPIFGTANYAQKFQGRVTITADESTSTAYMELSSLRSEDTAVYYCAREAEEGGWFDPWGQGTLVTVSSSTKGPSVFPLAPCSRSTSESTAALGCLVKDYFPEPVTVSWNSGALTSGVHTFPAVLQSSGLYSLSSVVTVPSSSLGTKTYTCNVDHKPSNTKVDKRVSKYGPPCPSCPPEFLGGPSVFLFPPKPKDTLMISRTPEVTCVVVDVSQEDPEVQFNWYVDGVEVHNAKTKPREEQFNSTYRVVSVLTVLHQDWLNGKEYKCKVSNKGLPSSIEKTISKAKQPREPQVYTLPPSQEEMTKNQVSLTCLVKGFYPSDIAVEWESNGQPENNYKTTPPVLDSDGSFFLYSRLTVDKSRWQEGNVFSCSVMHEALHNHYTQKSLSLSLGK

SEQ ID NO: 1885 - protein, 445 aa, synthetic construct
  REGION 1..445: note = CLL-1-Targeting IgG4 Antibody Heavy Chain
QVQLVQSGAEVKKPGASVKVSCKASGYTFTDYYMHWVRQAPGQGLEWMGWMNPNSGYTAYAQKFQGRVTMTRDTSTSTVYMELSSLRSEDTAVYYCAKDTPGSGWSSGMDVWGQGTTVTVSSSTKGPSVFPLAPCSRSTSESTAALGCLVKDYFPEPVTVSWNSGALTSGVHTFPAVLQSSGLYSLSSVVTVPSSSLGTKTYTCNVDHKPSNTKVDKRVSKYGPPCPSCPPEFLGGPSVFLFPPKPKDTLMISRTPEVTCVVVDVSQEDPEVQFNWYVDGVEVHNAKTKPREEQFNSTYRVVSVLTVLHQDWLNGKEYKCKVSNKGLPSSIEKTISKAKQPREPQVYTLPPSQEEMTKNQVSLTCLVKGFYPSDIAVEWESNGQPENNYKTTPPVLDSDGSFFLYSRLTVDKSRWQEGNVFSCSVMHEALHNHYTQKSLSLSLGK

SEQ ID NO: 1886 - protein, 445 aa, synthetic construct
  REGION 1..445: note = CLL-1-Targeting IgG4 Antibody Heavy Chain
QVQLVQSGAEVKKPGASVKVSCKASGGTFSNYAISWVRQAPGQGLEWMGWINPNSGGTNYAQKFQGRVTMTRDTSTSTVYMELSSLRSEDTAVYYCARVGYYDSSGGGMDVWGQGTTVTVSSSTKGPSVFPLAPCSRSTSESTAALGCLVKDYFPEPVTVSWNSGALTSGVHTFPAVLQSSGLYSLSSVVTVPSSSLGTKTYTCNVDHKPSNTKVDKRVSKYGPPCPSCPPEFLGGPSVFLFPPKPKDTLMISRTPEVTCVVVDVSQEDPEVQFNWYVDGVEVHNAKTKPREEQFNSTYRVVSVLTVLHQDWLNGKEYKCKVSNKGLPSSIEKTISKAKQPREPQVYTLPPSQEEMTKNQVSLTCLVKGFYPSDIAVEWESNGQPENNYKTTPPVLDSDGSFFLYSRLTVDKSRWQEGNVFSCSVMHEALHNHYTQKSLSLSLGK

SEQ ID NO: 1887 - protein, 445 aa, synthetic construct
  REGION 1..445: note = CLL-1-Targeting IgG4 Antibody Heavy Chain
QVQLVQSGAEVKKPGASVKVSCKASGYTFTGYYMHWVRQAPGQGLEWMGIINPIGGLTTYAQKFQGRVTMTRDTSTSTVYMELSSLRSEDTAVYYCASGAYGDYVDWYFDLWGRGTLVTVSSSTKGPSVFPLAPCSRSTSESTAALGCLVKDYFPEPVTVSWNSGALTSGVHTFPAVLQSSGLYSLSSVVTVPSSSLGTKTYTCNVDHKPSNTKVDKRVSKYGPPCPSCPPEFLGGPSVFLFPPKPKDTLMISRTPEVTCVVVDVSQEDPEVQFNWYVDGVEVHNAKTKPREEQFNSTYRVVSVLTVLHQDWLNGKEYKCKVSNKGLPSSIEKTISKAKQPREPQVYTLPPSQEEMTKNQVSLTCLVKGFYPSDIAVEWESNGQPENNYKTTPPVLDSDGSFFLYSRLTVDKSRWQEGNVFSCSVMHEALHNHYTQKSLSLSLGK

SEQ ID NO: 1888 - protein, 442 aa, synthetic construct
  REGION 1..442: note = CLL-1-Targeting IgG4 Antibody Heavy Chain
QVQLVQSGAEVKKPGASVKVSCKASGYTFTTYGISWVRQAPGQGLEWMGWINPNSGDTNYAQKFQGRVTMTRDTSTSTVYMELSSLRSEDTAVYYCARLTTATDSFDLWGRGTLVTVSSSTKGPSVFPLAPCSRSTSESTAALGCLVKDYFPEPVTVSWNSGALTSGVHTFPAVLQSSGLYSLSSVVTVPSSSLGTKTYTCNVDHKPSNTKVDKRVSKYGPPCPSCPPEFLGGPSVFLFPPKPKDTLMISRTPEVTCVVVDVSQEDPEVQFNWYVDGVEVHNAKTKPREEQFNSTYRVVSVLTVLHQDWLNGKEYKCKVSNKGLPSSIEKTISKAKQPREPQVYTLPPSQEEMTKNQVSLTCLVKGFYPSDIAVEWESNGQPENNYKTTPPVLDSDGSFFLYSRLTVDKSRWQEGNVFSCSVMHEALHNHYTQKSLSLSLGK

SEQ ID NO: 1889 - protein, 441 aa, synthetic construct
  REGION 1..441: note = CLL-1-Targeting IgG4 Antibody Heavy Chain
QVQLVQSGAEVKKPGASVKVSCKASGYSFTNYYIHWVRQAPGQGLEWMGWMNPYTGQTGYAQKFQGRVTMTRDTSTSTVYMELSSLRSEDTAVYYCTTDEETMDFHLWGRGTLVTVSSSTKGPSVFPLAPCSRSTSESTAALGCLVKDYFPEPVTVSWNSGALTSGVHTFPAVLQSSGLYSLSSVVTVPSSSLGTKTYTCNVDHKPSNTKVDKRVSKYGPPCPSCPPEFLGGPSVFLFPPKPKDTLMISRTPEVTCVVVDVSQEDPEVQFNWYVDGVEVHNAKTKPREEQFNSTYRVVSVLTVLHQDWLNGKEYKCKVSNKGLPSSIEKTISKAKQPREPQVYTLPPSQEEMTKNQVSLTCLVKGFYPSDIAVEWESNGQPENNYKTTPPVLDSDGSFFLYSRLTVDKSRWQEGNVFSCSVMHEALHNHYTQKSLSLSLGK

SEQ ID NO: 1890 - protein, 445 aa, synthetic construct
  REGION 1..445: note = CLL-1-Targeting IgG4 Antibody Heavy Chain
QVQLVQSGAEVKKPGASVKVSCKASGYTFTGYHIHWVRQAPGQGLEWMGRINPNSGGTDYAQKFQGRVTMTRDTSTSTVYMELSSLRSEDTAVYYCARETYSGSYEESFDYWGQGTLVTVSSSTKGPSVFPLAPCSRSTSESTAALGCLVKDYFPEPVTVSWNSGALTSGVHTFPAVLQSSGLYSLSSVVTVPSSSLGTKTYTCNVDHKPSNTKVDKRVSKYGPPCPSCPPEFLGGPSVFLFPPKPKDTLMISRTPEVTCVVVDVSQEDPEVQFNWYVDGVEVHNAKTKPREEQFNSTYRVVSVLTVLHQDWLNGKEYKCKVSNKGLPSSIEKTISKAKQPREPQVYTLPPSQEEMTKNQVSLTCLVKGFYPSDIAVEWESNGQPENNYKTTPPVLDSDGSFFLYSRLTVDKSRWQEGNVFSCSVMHEALHNHYTQKSLSLSLGK

SEQ ID NO: 1891 - protein, 214 aa, synthetic construct; identical to SEQ ID NO: 1715
  REGION 1..214: note = CD33-Targeting IgG4 Antibody Light Chain

SEQ ID NO: 1892 - protein, 214 aa, synthetic construct; identical to SEQ ID NO: 1716
  REGION 1..214: note = CD33-Targeting IgG4 Antibody Light Chain

SEQ ID NO: 1893 - protein, 214 aa, synthetic construct; identical to SEQ ID NO: 1717
  REGION 1..214: note = CD33-Targeting IgG4 Antibody Light Chain

SEQ ID NO: 1894 - protein, 214 aa, synthetic construct; identical to SEQ ID NO: 1718
  REGION 1..214: note = CD33-Targeting IgG4 Antibody Light Chain

SEQ ID NO: 1895 - protein, 219 aa, synthetic construct; identical to SEQ ID NO: 1719
  REGION 1..219: note = CD33-Targeting IgG4 Antibody Light Chain

SEQ ID NO: 1896 - protein, 214 aa, synthetic construct; identical to SEQ ID NO: 1720
  REGION 1..214: note = CD33-Targeting IgG4 Antibody Light Chain

SEQ ID NO: 1897 - protein, 214 aa, synthetic construct; identical to SEQ ID NO: 1721
  REGION 1..214: note = CD33-Targeting IgG4 Antibody Light Chain

SEQ ID NO: 1898 - protein, 214 aa, synthetic construct; identical to SEQ ID NO: 1722
  REGION 1..214: note = CD33-Targeting IgG4 Antibody Light Chain

SEQ ID NO: 1899 - protein, 214 aa, synthetic construct; identical to SEQ ID NO: 1723
  REGION 1..214: note = CD33-Targeting IgG4 Antibody Light Chain

SEQ ID NO: 1900 - protein, 220 aa, synthetic construct; identical to SEQ ID NO: 1724
  REGION 1..220: note = CD33-Targeting IgG4 Antibody Light Chain

SEQ ID NO: 1901 - protein, 214 aa, synthetic construct; identical to SEQ ID NO: 1725
  REGION 1..214: note = CD33-Targeting IgG4 Antibody Light Chain

SEQ ID NO: 1902 - protein, 214 aa, synthetic construct; identical to SEQ ID NO: 1726
  REGION 1..214: note = CD33-Targeting IgG4 Antibody Light Chain

SEQ ID NO: 1903 - protein, 214 aa, synthetic construct; identical to SEQ ID NO: 1727
  REGION 1..214: note = CD33-Targeting IgG4 Antibody Light Chain

SEQ ID NO: 1904 - protein, 220 aa, synthetic construct; identical to SEQ ID NO: 1728
  REGION 1..220: note = CD33-Targeting IgG4 Antibody Light Chain

SEQ ID NO: 1905 - protein, 219 aa, synthetic construct; identical to SEQ ID NO: 1729
  REGION 1..219: note = CD33-Targeting IgG4 Antibody Light Chain

SEQ ID NO: 1906 - protein, 219 aa, synthetic construct; identical to SEQ ID NO: 1730
  REGION 1..219: note = CD33-Targeting IgG4 Antibody Light Chain

SEQ ID NO: 1907 - protein, 214 aa, synthetic construct; identical to SEQ ID NO: 1731
  REGION 1..214: note = CD33-Targeting IgG4 Antibody Light Chain

SEQ ID NO: 1908 - protein, 219 aa, synthetic construct; identical to SEQ ID NO: 1732
  REGION 1..219: note = CD33-Targeting IgG4 Antibody Light Chain

SEQ ID NO: 1909 - protein, 214 aa, synthetic construct; identical to SEQ ID NO: 1733
  REGION 1..214: note = CD33-Targeting IgG4 Antibody Light Chain

SEQ ID NO: 1910 - protein, 214 aa, synthetic construct; identical to SEQ ID NO: 1734
  REGION 1..214: note = CD33-Targeting IgG4 Antibody Light Chain

SEQ ID NO: 1911 - protein, 214 aa, synthetic construct; identical to SEQ ID NO: 1735
  REGION 1..214: note = CD33-Targeting IgG4 Antibody Light Chain

SEQ ID NO: 1912 - protein, 214 aa, synthetic construct; identical to SEQ ID NO: 1736
  REGION 1..214: note = CD33-Targeting IgG4 Antibody Light Chain

SEQ ID NO: 1913 - protein, 214 aa, synthetic construct; identical to SEQ ID NO: 1737
  REGION 1..214: note = CD33-Targeting IgG4 Antibody Light Chain

SEQ ID NO: 1914 - protein, 219 aa, synthetic construct; identical to SEQ ID NO: 1738
  REGION 1..219: note = CD33-Targeting IgG4 Antibody Light Chain

SEQ ID NO: 1915 - protein, 214 aa, synthetic construct; identical to SEQ ID NO: 1739
  REGION 1..214: note = CD33-Targeting IgG4 Antibody Light Chain

SEQ ID NO: 1916 - protein, 214 aa, synthetic construct; identical to SEQ ID NO: 1740
  REGION 1..214: note = CD33-Targeting IgG4 Antibody Light Chain

SEQ ID NO: 1917 - protein, 214 aa, synthetic construct; identical to SEQ ID NO: 1741
  REGION 1..214: note = CD33-Targeting IgG4 Antibody Light Chain

SEQ ID NO: 1918 - protein, 214 aa, synthetic construct; identical to SEQ ID NO: 1742
  REGION 1..214: note = CD33-Targeting IgG4 Antibody Light Chain

SEQ ID NO: 1919 - protein, 214 aa, synthetic construct; identical to SEQ ID NO: 1743
  REGION 1..214: note = CD33-Targeting IgG4 Antibody Light Chain

SEQ ID NO: 1920 - protein, 214 aa, synthetic construct; identical to SEQ ID NO: 1744
  REGION 1..214: note = CD33-Targeting IgG4 Antibody Light Chain

SEQ ID NO: 1921 - protein, 214 aa, synthetic construct; identical to SEQ ID NO: 1745
  REGION 1..214: note = CD33-Targeting IgG4 Antibody Light Chain

SEQ ID NO: 1922 - protein, 215 aa, synthetic construct; identical to SEQ ID NO: 1746
  REGION 1..215: note = CD33-Targeting IgG4 Antibody Light Chain

SEQ ID NO: 1923 - protein, 214 aa, synthetic construct; identical to SEQ ID NO: 1747
  REGION 1..214: note = CD33-Targeting IgG4 Antibody Light Chain

SEQ ID NO: 1924 - protein, 214 aa, synthetic construct; identical to SEQ ID NO: 1748
  REGION 1..214: note = CD33-Targeting IgG4 Antibody Light Chain

SEQ ID NO: 1925 - protein, 214 aa, synthetic construct; identical to SEQ ID NO: 1748
  REGION 1..214: note = CD33-Targeting IgG4 Antibody Light Chain

SEQ ID NO: 1926 - protein, 214 aa, synthetic construct; identical to SEQ ID NO: 1750
  REGION 1..214: note = CD33-Targeting IgG4 Antibody Light Chain

SEQ ID NO: 1927 - protein, 214 aa, synthetic construct; identical to SEQ ID NO: 1751
  REGION 1..214: note = CD33-Targeting IgG4 Antibody Light Chain

SEQ ID NO: 1928 - protein, 214 aa, synthetic construct; identical to SEQ ID NO: 1752
  REGION 1..214: note = CD33-Targeting IgG4 Antibody Light Chain

SEQ ID NO: 1929 - protein, 214 aa, synthetic construct; identical to SEQ ID NO: 1753
  REGION 1..214: note = CD33-Targeting IgG4 Antibody Light Chain

SEQ ID NO: 1930 - protein, 214 aa, synthetic construct; identical to SEQ ID NO: 1754
  REGION 1..214: note = CD33-Targeting IgG4 Antibody Light Chain

SEQ ID NO: 1931 - protein, 219 aa, synthetic construct; identical to SEQ ID NO: 1755
  REGION 1..219: note = CD33-Targeting IgG4 Antibody Light Chain

SEQ ID NO: 1932 - protein, 214 aa, synthetic construct; identical to SEQ ID NO: 1756
  REGION 1..214: note = CD33-Targeting IgG4 Antibody Light Chain

SEQ ID NO: 1933 - protein, 215 aa, synthetic construct; identical to SEQ ID NO: 1757
  REGION 1..215: note = CLL-1-Targeting IgG4 Antibody Light Chain

SEQ ID NO: 1934 - protein, 219 aa, synthetic construct; identical to SEQ ID NO: 1758
  REGION 1..219: note = CLL-1-Targeting IgG4 Antibody Light Chain

SEQ ID NO: 1935 - protein, 214 aa, synthetic construct; identical to SEQ ID NO: 1759
  REGION 1..214: note = CLL-1-Targeting IgG4 Antibody Light Chain

SEQ ID NO: 1936 - protein, 214 aa, synthetic construct; identical to SEQ ID NO: 1760
  REGION 1..214: note = CLL-1-Targeting IgG4 Antibody Light Chain

SEQ ID NO: 1937 - protein, 219 aa, synthetic construct; identical to SEQ ID NO: 1761
  REGION 1..219: note = CLL-1-Targeting IgG4 Antibody Light Chain

SEQ ID NO: 1938 - protein, 214 aa, synthetic construct; identical to SEQ ID NO: 1762
  REGION 1..214: note = CLL-1-Targeting IgG4 Antibody Light Chain

SEQ ID NO: 1939 - protein, 214 aa, synthetic construct; identical to SEQ ID NO: 1763
  REGION 1..214: note = CLL-1-Targeting IgG4 Antibody Light Chain

SEQ ID NO: 1940 - protein, 214 aa, synthetic construct; identical to SEQ ID NO: 1764
  REGION 1..214: note = CLL-1-Targeting IgG4 Antibody Light Chain

SEQ ID NO: 1941 - protein, 214 aa, synthetic construct; identical to SEQ ID NO: 1765
  REGION 1..214: note = CLL-1-Targeting IgG4 Antibody Light Chain

SEQ ID NO: 1942 - protein, 214 aa, synthetic construct; identical to SEQ ID NO: 1766
  REGION 1..214: note = CLL-1-Targeting IgG4 Antibody Light Chain

SEQ ID NO: 1943 - protein, 214 aa, synthetic construct; identical to SEQ ID NO: 1767
  REGION 1..214: note = CLL-1-Targeting IgG4 Antibody Light Chain

SEQ ID NO: 1944 - protein, 214 aa, synthetic construct; identical to SEQ ID NO: 1768
  REGION 1..214: note = CLL-1-Targeting IgG4 Antibody Light Chain

SEQ ID NO: 1945 - protein, 214 aa, synthetic construct; identical to SEQ ID NO: 1769
  REGION 1..214: note = CLL-1-Targeting IgG4 Antibody Light Chain

SEQ ID NO: 1946 - protein, 214 aa, synthetic construct; identical to SEQ ID NO: 1770
  REGION 1..214: note = CLL-1-Targeting IgG4 Antibody Light Chain

SEQ ID NO: 1947 - protein, 214 aa, synthetic construct; identical to SEQ ID NO: 1771
  REGION 1..214: note = CLL-1-Targeting IgG4 Antibody Light Chain

SEQ ID NO: 1948 - protein, 214 aa, synthetic construct; identical to SEQ ID NO: 1772
  REGION 1..214: note = CLL-1-Targeting IgG4 Antibody Light Chain

SEQ ID NO: 1949 - protein, 214 aa, synthetic construct; identical to SEQ ID NO: 1773
  REGION 1..214: note = CLL-1-Targeting IgG4 Antibody Light Chain

SEQ ID NO: 1950 - protein, 214 aa, synthetic construct; identical to SEQ ID NO: 1774
  REGION 1..214: note = CLL-1-Targeting IgG4 Antibody Light Chain

SEQ ID NO: 1951 - protein, 214 aa, synthetic construct; identical to SEQ ID NO: 1775
  REGION 1..214: note = CLL-1-Targeting IgG4 Antibody Light Chain

SEQ ID NO: 1952 - protein, 214 aa, synthetic construct; identical to SEQ ID NO: 1776
  REGION 1..214: note = CLL-1-Targeting IgG4 Antibody Light Chain

SEQ ID NO: 1953 - protein, 214 aa, synthetic construct; identical to SEQ ID NO: 1777
  REGION 1..214: note = CLL-1-Targeting IgG4 Antibody Light Chain

SEQ ID NO: 1954 - protein, 219 aa, synthetic construct; identical to SEQ ID NO: 1778
  REGION 1..219: note = CLL-1-Targeting IgG4 Antibody Light Chain

SEQ ID NO: 1955 - protein, 214 aa, synthetic construct; identical to SEQ ID NO: 1779
  REGION 1..214: note = CLL-1-Targeting IgG4 Antibody Light Chain

SEQ ID NO: 1956 - protein, 214 aa, synthetic construct; identical to SEQ ID NO: 1780
  REGION 1..214: note = CLL-1-Targeting IgG4 Antibody Light Chain

SEQ ID NO: 1957 - protein, 214 aa, synthetic construct; identical to SEQ ID NO: 1781
  REGION 1..214: note = CLL-1-Targeting IgG4 Antibody Light Chain

SEQ ID NO: 1958 - protein, 214 aa, synthetic construct; identical to SEQ ID NO: 1782
  REGION 1..214: note = CLL-1-Targeting IgG4 Antibody Light Chain

SEQ ID NO: 1959 - protein, 214 aa, synthetic construct; identical to SEQ ID NO: 1783
  REGION 1..214: note = CLL-1-Targeting IgG4 Antibody Light Chain

SEQ ID NO: 1960 - protein, 214 aa, synthetic construct; identical to SEQ ID NO: 1784
  REGION 1..214: note = CLL-1-Targeting IgG4 Antibody Light Chain

SEQ ID NO: 1961 - protein, 214 aa, synthetic construct; identical to SEQ ID NO: 1785
  REGION 1..214: note = CLL-1-Targeting IgG4 Antibody Light Chain

SEQ ID NO: 1962 - protein, 214 aa, synthetic construct; identical to SEQ ID NO: 1786
  REGION 1..214: note = CLL-1-Targeting IgG4 Antibody Light Chain

SEQ ID NO: 1963 - protein, 214 aa, synthetic construct; identical to SEQ ID NO: 1787
  REGION 1..214: note = CLL-1-Targeting IgG4 Antibody Light Chain

SEQ ID NO: 1964 - protein, 214 aa, synthetic construct; identical to SEQ ID NO: 1788
  REGION 1..214: note = CLL-1-Targeting IgG4 Antibody Light Chain

SEQ ID NO: 1965 - protein, 213 aa, synthetic construct; identical to SEQ ID NO: 1789
  REGION 1..213: note = CLL-1-Targeting IgG4 Antibody Light Chain

SEQ ID NO: 1966 - protein, 214 aa, synthetic construct; identical to SEQ ID NO: 1790
  REGION 1..214: note = CLL-1-Targeting IgG4 Antibody Light Chain

SEQ ID NO: 1967 - protein, 215 aa, synthetic construct; identical to SEQ ID NO: 1791
  REGION 1..215: note = CLL-1-Targeting IgG4 Antibody Light Chain

SEQ ID NO: 1968 - protein, 214 aa, synthetic construct; identical to SEQ ID NO: 1792
  REGION 1..214: note = CLL-1-Targeting IgG4 Antibody Light Chain

SEQ ID NO: 1969 - protein, 214 aa, synthetic construct; identical to SEQ ID NO: 1793
  REGION 1..214: note = CLL-1-Targeting IgG4 Antibody Light Chain

SEQ ID NO: 1970 - protein, 214 aa, synthetic construct; identical to SEQ ID NO: 1794
  REGION 1..214: note = CLL-1-Targeting IgG4 Antibody Light Chain

SEQ ID NO: 1971 - protein, 214 aa, synthetic construct; identical to SEQ ID NO: 1795
  REGION 1..214: note = CLL-1-Targeting IgG4 Antibody Light Chain

SEQ ID NO: 1972 - protein, 214 aa, synthetic construct; identical to SEQ ID NO: 1796
  REGION 1..214: note = CLL-1-Targeting IgG4 Antibody Light Chain

SEQ ID NO: 1973 - protein, 214 aa, synthetic construct; identical to SEQ ID NO: 1797
  REGION 1..214: note = CLL-1-Targeting IgG4 Antibody Light Chain

SEQ ID NO: 1974 - protein, 214 aa, synthetic construct; identical to SEQ ID NO: 1798
  REGION 1..214: note = CLL-1-Targeting IgG4 Antibody Light Chain

SEQ ID NO: 1975 - protein, 214 aa, synthetic construct; identical to SEQ ID NO: 1799
  REGION 1..214: note = CLL-1-Targeting IgG4 Antibody Light Chain

SEQ ID NO: 1976 - protein, 219 aa, synthetic construct; identical to SEQ ID NO: 1800
  REGION 1..219: note = CLL-1-Targeting IgG4 Antibody Light Chain

SEQ ID NO: 1977 - protein, 214 aa, synthetic construct
  REGION 1..214: note = CLL-1-Targeting IgG4 Antibody Light Chain
DIQMTQSPSSLSASVGDRVTITCRASQSISSYLNWYQQKPGKAPKLLIYDASNLETGVPSRFSGSGSGTDFTLTISSLQPEDFATYYCQQANTFPITFGQGTRLEIKRTVAAPSVFIFPPSDEQLKSGTASVVCLLNNFYPREAKVQWKVDNALQSGNSQESVTEQDSKDSTYSLSSTLTLSKADYEKHKVYACEVTHQGLSSPVTKSFNRGEC

SEQ ID NO: 1978 - protein, 219 aa, synthetic construct; identical to SEQ ID NO: 1802
  REGION 1..219: note = CLL-1-Targeting IgG4 Antibody Light Chain

SEQ ID NO: 1979 - protein, 9 aa, synthetic construct
  REGION 1..9: note = Non-Selective Anti-CD33 HCDR1
GTFSSYAIS

SEQ ID NO: 1980 - protein, 9 aa, synthetic construct
  REGION 1..9: note = Non-Selective Anti-CD33 HCDR1
YTFTNYYMH

SEQ ID NO: 1981 - protein, 9 aa, synthetic construct
  REGION 1..9: note = Non-Selective Anti-CD33 HCDR1
FTFSNSDMN

SEQ ID NO: 1982 - protein, 13 aa, synthetic construct
  REGION 1..13: note = Non-Selective Anti-CD33 HCDR2
GWMNPNSGNTGYA

SEQ ID NO: 1983 - protein, 13 aa, synthetic construct
  REGION 1..13: note = Non-Selective Anti-CD33 HCDR2
GWINPNSGDTNYE

SEQ ID NO: 1984 - protein, 13 aa, synthetic construct
  REGION 1..13: note = Non-Selective Anti-CD33 HCDR2
SYISGTGSTIYYA

SEQ ID NO: 1985 - protein, 16 aa, synthetic construct
  REGION 1..16: note = Non-Selective Anti-CD33 HCDR3
CAREDYYDSSGNFDYW

SEQ ID NO: 1986 - protein, 16 aa, synthetic construct
  REGION 1..16: note = Non-Selective Anti-CD33 HCDR3
CARDDRIQLWVPLVFW

SEQ ID NO: 1987 - protein, 19 aa, synthetic construct
  REGION 1..19: note = Non-Selective Anti-CD33 HCDR3
CAKDYDSSYGSGYYGMDVW

SEQ ID NO: 1988 - protein, 11 aa, synthetic construct
  REGION 1..11: note = Non-Selective Anti-CD33 LCDR1
QASHDINIHLN

SEQ ID NO: 1989 - protein, 11 aa, synthetic construct
  REGION 1..11: note = Non-Selective Anti-CD33 LCDR1
RASQGISNYLA

SEQ ID NO: 1990 - protein, 11 aa, synthetic construct
  REGION 1..11: note = Non-Selective Anti-CD33 LCDR1
RASQSIYNYLN

SEQ ID NO: 1991 - protein, 7 aa, synthetic construct
  REGION 1..7: note = Non-Selective Anti-CD33 LCDR2
DASNLET

SEQ ID NO: 1992 - protein, 7 aa, synthetic construct
  REGION 1..7: note = Non-Selective Anti-CD33 LCDR2
SASNLQS

SEQ ID NO: 1993 - protein, 7 aa, synthetic construct
  REGION 1..7: note = Non-Selective Anti-CD33 LCDR2
AASNLQS

SEQ ID NO: 1994 - protein, 11 aa, synthetic construct
  REGION 1..11: note = Non-Selective Anti-CD33 LCDR3
CQQAYSLPWTF

SEQ ID NO: 1995 - protein, 11 aa, synthetic construct [sequence omitted]

SEQ ID NO: 1996 - protein, 11 aa, synthetic construct [sequence omitted]

SEQ ID NO: 1997 - protein, 121 aa, synthetic construct; identical to SEQ ID NO: 1037
  REGION 1..121: note = Non-Selective Anti-CD33 Full VH

SEQ ID NO: 1998 - protein, 121 aa, synthetic construct; identical to SEQ ID NO: 1035
  REGION 1..121: note = Non-Selective Anti-CD33 Full VH

SEQ ID NO: 1999 - protein, 124 aa, synthetic construct; identical to SEQ ID NO: 1036
  REGION 1..124: note = Non-Selective Anti-CD33 Full VH

SEQ ID NO: 2000 - protein, 108 aa, synthetic construct; identical to SEQ ID NO: 1092
  REGION 1..108: note = Non-Selective Anti-CD33 Full VL

SEQ ID NO: 2001 - protein, 108 aa, synthetic construct; identical to SEQ ID NO: 1090
  REGION 1..108: note = Non-Selective Anti-CD33 Full VL

SEQ ID NO: 2002 - protein, 108 aa, synthetic construct; identical to SEQ ID NO: 1091
  REGION 1..108: note = Non-Selective Anti-CD33 Full VL

SEQ ID NO: 2003 - protein, 9 aa, synthetic construct
  REGION 1..9: note = Non-Selective Anti-CLL-1 HCDR1
VTFSNSGIN

SEQ ID NO: 2004 - protein, 9 aa, synthetic construct
  REGION 1..9: note = Non-Selective Anti-CLL-1 HCDR1
YTFTNSYIH

SEQ ID NO: 2005 - protein, 9 aa, synthetic construct
  REGION 1..9: note = Non-Selective Anti-CLL-1 HCDR1
YTLTNYYMH

SEQ ID NO: 2006 - protein, 9 aa, synthetic construct
  REGION 1..9: note = Non-Selective Anti-CLL-1 HCDR1
YTLTNNWMH

SEQ ID NO: 2007 - protein, 9 aa, synthetic construct
  REGION 1..9: note = Non-Selective Anti-CLL-1 HCDR1
FTFSTFWMS

SEQ ID NO: 2008 - protein, 9 aa, synthetic construct
  REGION 1..9: note = Non-Selective Anti-CLL-1 HCDR1
DTFTGYHIH

SEQ ID NO: 2009 - protein, 9 aa, synthetic construct
  REGION 1..9: note = Non-Selective Anti-CLL-1 HCDR1
YTFTDYYMH

SEQ ID NO: 2010 - protein, 13 aa, synthetic construct
  REGION 1..13: note = Non-Selective Anti-CLL-1 HCDR2
GWMNPASGDTGYA

SEQ ID NO: 2011 - protein, 13 aa, synthetic construct
  REGION 1..13: note = Non-Selective Anti-CLL-1 HCDR2
GIINPSGDSTTYA

SEQ ID NO: 2012 - protein, 13 aa, synthetic construct
  REGION 1..13: note = Non-Selective Anti-CLL-1 HCDR2
GWISPTDGKTKYA

SEQ ID NO: 2013 - protein, 13 aa, synthetic construct
  REGION 1..13: note = Non-Selective Anti-CLL-1 HCDR2
GWMNPNSGNTGYA

SEQ ID NO: 2014 - protein, 13 aa, synthetic construct
  REGION 1..13: note = Non-Selective Anti-CLL-1 HCDR2
ATISYDGSNQYYA

SEQ ID NO: 2015 - protein, 13 aa, synthetic construct
  REGION 1..13: note = Non-Selective Anti-CLL-1 HCDR2
GWMNPDSGSTGYA

SEQ ID NO: 2016 - protein, 13 aa, synthetic construct
  REGION 1..13: note = Non-Selective Anti-CLL-1 HCDR2
GWMNPNSGNTGYA

SEQ ID NO: 2017 - protein, 14 aa, synthetic construct
  REGION 1..14: note = Non-Selective Anti-CLL-1 HCDR3
CARGEYGAEYFQHW

SEQ ID NO: 2018 - protein, 13 aa, synthetic construct
  REGION 1..13: note = Non-Selective Anti-CLL-1 HCDR3
CAKPTTGDGMDVW

SEQ ID NO: 2019 - protein, 13 aa, synthetic construct
  REGION 1..13: note = Non-Selective Anti-CLL-1 HCDR3
CTTDLLGDWFDPW

SEQ ID NO: 2020 - protein, 13 aa, synthetic construct
  REGION 1..13: note = Non-Selective Anti-CLL-1 HCDR3
CATATADDAFDIW

SEQ ID NO: 2021 - protein, 14 aa, synthetic construct
  REGION 1..14: note = Non-Selective Anti-CLL-1 HCDR3
CARLELHEGRFDYW

SEQ ID NO: 2022 - protein, 14 aa, synthetic construct
  REGION 1..14: note = Non-Selective Anti-CLL-1 HCDR3
CTTDRLYGDYFDYW

SEQ ID NO: 2023 - protein, 15 aa, synthetic construct
  REGION 1..15: note = Non-Selective Anti-CLL-1 HCDR3
CAADDTKSPYGMDVW

SEQ ID NO: 2024 - protein, 11 aa, synthetic construct
  REGION 1..11: note = Non-Selective Anti-CLL-1 HCDR3
RASQSISSWLA

SEQ ID NO: 2025 - protein, 11 aa, synthetic construct
  REGION 1..11: note = Non-Selective Anti-CLL-1 LCDR1
RASQGISNWLA

SEQ ID NO: 2026 - protein, 11 aa, synthetic construct
  REGION 1..11: note = Non-Selective Anti-CLL-1 LCDR1
RASRSIRSYLN

SEQ ID NO: 2027 - protein, 11 aa, synthetic construct
  REGION 1..11: note = Non-Selective Anti-CLL-1 LCDR1
RASQSISTWLA

SEQ ID NO: 2028 - protein, 11 aa, synthetic construct
  REGION 1..11: note = Non-Selective Anti-CLL-1 LCDR1
RASQSISSYLN

SEQ ID NO: 2029 - protein, 11 aa, synthetic construct
  REGION 1..11: note = Non-Selective Anti-CLL-1 LCDR1
RASQSVSSWLA

SEQ ID NO: 2030 - protein, 11 aa, synthetic construct
  REGION 1..11: note = Non-Selective Anti-CLL-1 LCDR1
QASQDISNYLN

SEQ ID NO: 2031 - protein, 7 aa, synthetic construct
  REGION 1..7: note = Non-Selective Anti-CLL-1 LCDR2
DASSLES

SEQ ID NO: 2032 - protein, 7 aa, synthetic construct
  REGION 1..7: note = Non-Selective Anti-CLL-1 LCDR2
DASNLET

SEQ ID NO: 2033 - protein, 7 aa, synthetic construct
  REGION 1..7: note = Non-Selective Anti-CLL-1 LCDR2
DASNLET

SEQ ID NO: 2034 - protein, 7 aa, synthetic construct
  REGION 1..7: note = Non-Selective Anti-CLL-1 LCDR2
GASSLQS

SEQ ID NO: 2035 - protein, 7 aa, synthetic construct
  REGION 1..7: note = Non-Selective Anti-CLL-1 LCDR2
DASNLET

SEQ ID NO: 2036 - protein, 7 aa, synthetic construct
  REGION 1..7: note = Non-Selective Anti-CLL-1 LCDR2
DASSLQS

SEQ ID NO: 2037 - protein, 7 aa, synthetic construct
  REGION 1..7: note = Non-Selective Anti-CLL-1 LCDR2
EASSLQS

SEQ ID NO: 2038 - protein, 11 aa, synthetic construct
  REGION 1..11: note = Non-Selective Anti-CLL-1 LCDR3
CQQSHSLPPTF

SEQ ID NO: 2039 - protein, 11 aa, synthetic construct [sequence omitted]

SEQ ID NO: 2040 - protein, 11 aa, synthetic construct [sequence omitted]

SEQ ID NO: 2041 - protein, 11 aa, synthetic construct
  REGION 1..11: note = Non-Selective Anti-CLL-1 LCDR3
CQQSYDIPITF

SEQ ID NO: 2042 - protein, 11 aa, synthetic construct [sequence omitted]

SEQ ID NO: 2043 - protein, 11 aa, synthetic construct [sequence omitted]

SEQ ID NO: 2044 - protein, 11 aa, synthetic construct [sequence omitted]

SEQ ID NO: 2045 - protein, 119 aa, synthetic construct
  REGION 1..119: note = Non-Selective Anti-CLL-1 Full VH
QVQLVQSGAEVKKPGASVKVSCKASGVTFSNSGINWVRQAPGQGLEWMGWMNPASGDTGYAQKFQGRVTMTRDTSTSTVYMELSSLRSEDTAVYYCARGEYGAEYFQHWGQGTLVTVSS

SEQ ID NO: 2046 - protein, 118 aa, synthetic construct
  REGION 1..118: note = Non-Selective Anti-CLL-1 Full VH
QVQLVQSGAEVKKPGASVKVSCKASGYTFTNSYIHWVRQAPGQGLEWMGIINPSGDSTTYAQKFQGRVTMTRDTSTSTVYMELSSLRSEDTAVYYCAKPTTGDGMDVWGQGTTVTVSS

SEQ ID NO: 2047 - protein, 118 aa, synthetic construct
  REGION 1..118: note = Non-Selective Anti-CLL-1 Full VH
QVQLVQSGAEVKKPGASVKVSCKASGYTLTNYYMHWVRQAPGQGLEWMGWISPTDGKTKYAQKFQGRVTMTRDTSTSTVYMELSSLRSEDTAVYYCTTDLLGDWFDPWGQGTLVTVSS

SEQ ID NO: 2048 - protein, 118 aa, synthetic construct
  REGION 1..118: note = Non-Selective Anti-CLL-1 Full VH
QVQLVQSGAEVKKPGASVKVSCKASGYTLTNNWMHWVRQAPGQGLEWMGWMNPNSGNTGYAQKFQGRVTMTRDTSTSTVYMELSSLRSEDTAVYYCATATADDAFDIWGQGTMVTVSS

SEQ ID NO: 2049 - protein, 119 aa, synthetic construct
  REGION 1..119: note = Non-Selective Anti-CLL-1 Full VH
EVQLLESGGGLVQPGGSLRLSCAASGFTFSTFWMSWVRQAPGKGLEWVATISYDGSNQYYADSVKGRFTISRDNSKNTLYLQMNSLRAEDTAVYYCARLELHEGRFDYWGQGTLVTVSS

SEQ ID NO: 2050 - protein, 119 aa, synthetic construct
  REGION 1..119: note = Non-Selective Anti-CLL-1 Full VH
QVQLVQSGAEVKKPGASVKVSCKASGDTFTGYHIHWVRQAPGQGLEWMGWMNPDSGSTGYAQKFQGRVTMTRDTSTSTVYMELSSLRSEDTAVYYCTTDRLYGDYFDYWGQGTLVTVSS

SEQ ID NO: 2051 - protein, 120 aa, synthetic construct
  REGION 1..120: note = Non-Selective Anti-CLL-1 Full VH
QVQLVQSGAEVKKPGASVKVSCKASGYTFTDYYMHWVRQAPGQGLEWMGWMNPNSGNTGYAQKFQGRVTMTRDTSTSTVYMELSSLRSEDTAVYYCAADDTKSPYGMDVWGQGTMVTVSS

SEQ ID NO: 2052 - protein, 108 aa, synthetic construct
  REGION 1..108: note = Non-Selective Anti-CLL-1 Full VL
DIQMTQSPSSLSASVGDRVTITCRASQSISSWLAWYQQKPGKAPKLLIYDASSLESGVPSRFSGSGSGTDFTLTISSLQPEDFATYYCQQSHSLPPTFGQGTRLEIKR

SEQ ID NO: 2053 - protein, 108 aa, synthetic construct
  REGION 1..108: note = Non-Selective Anti-CLL-1 Full VL
DIQMTQSPSSLSASVGDRVTITCRASQGISNWLAWYQQKPGKAPKLLIYDASNLETGVPSRFSGSGSGTDFTLTISSLQPEDFATYYCQQSYSTPLTFGGGTKVEIKR

SEQ ID NO: 2054 - protein, 108 aa, synthetic construct
  REGION 1..108: note = Non-Selective Anti-CLL-1 Full VL
DIQMTQSPSSLSASVGDRVTITCRASRSIRSYLNWYQQKPGKAPKLLIYDASNLETGVPSRFSGSGSGTDFTLTISSLQPEDFATYYCQQSYNTPWTFGQGTKVEIKR

SEQ ID NO: 2055 - protein, 108 aa, synthetic construct
  REGION 1..108: note = Non-Selective Anti-CLL-1 Full VL
DIQMTQSPSSLSASVGDRVTITCRASQSISTWLAWYQQKPGKAPKLLIYGASSLQSGVPSRFSGSGSGTDFTLTISSLQPEDFATYYCQQSYDIPITFGPGTKVDIKR

SEQ ID NO: 2056 - protein, 108 aa, synthetic construct
  REGION 1..108: note = Non-Selective Anti-CLL-1 Full VL
DIQMTQSPSSLSASVGDRVTITCRASQSISSYLNWYQQKPGKAPKLLIYDASNLETGVPSRFSGSGSGTDFTLTISSLQPEDFATYYCQQANSFPFTFGPGTKVDIKR

SEQ ID NO: 2057 - protein, 108 aa, synthetic construct
  REGION 1..108: note = Non-Selective Anti-CLL-1 Full VL
DIQMTQSPSSLSASVGDRVTITCRASQSVSSWLAWYQQKPGKAPKLLIYDASSLQSGVPSRFSGSGSGTDFTLTISSLQPEDFATYYCQQANSFPFTFGPGTKVDIKR

SEQ ID NO: 2058 - protein, 108 aa, synthetic construct
  REGION 1..108: note = Non-Selective Anti-CLL-1 Full VL
DIQMTQSPSSLSASVGDRVTITCQASQDISNYLNWYQQKPGKAPKLLIYEASSLQSGVPSRFSGSGSGTDFTLTISSLQPEDFATYYCQQTYSPPPTFGQGTKLEIKR

SEQ ID NO: 2059 - protein, 9 aa, synthetic construct
  REGION 1..9: note = Non-Selective Anti-FLT3 HCDR1
GTFSSDGIS

SEQ ID NO: 2060 - protein, 9 aa, synthetic construct
  REGION 1..9: note = Non-Selective Anti-FLT3 HCDR1
YTFTNYYMH

SEQ ID NO: 2061 - protein, 9 aa, synthetic construct
  REGION 1..9: note = Non-Selective Anti-FLT3 HCDR1
YTLTELSMH

SEQ ID NO: 2062 - protein, 9 aa, synthetic construct
  REGION 1..9: note = Non-Selective Anti-FLT3 HCDR1
FDFSTYNMF

SEQ ID NO: 2063 - protein, 9 aa, synthetic construct
  REGION 1..9: note = Non-Selective Anti-FLT3 HCDR1
GSFISHTFS

SEQ ID NO: 2064 - protein, 9 aa, synthetic construct
  REGION 1..9: note = Non-Selective Anti-FLT3 HCDR1
YTFTSYYLH

SEQ ID NO: 2065 - protein, 9 aa, synthetic construct
  REGION 1..9: note = Non-Selective Anti-FLT3 HCDR1
YTFTNYYMH

SEQ ID NO: 2066 - protein, 9 aa, synthetic construct
  REGION 1..9: note = Non-Selective Anti-FLT3 HCDR1
GTFSSRSIS

SEQ ID NO: 2067 - protein, 9 aa, synthetic construct
  REGION 1..9: note = Non-Selective Anti-FLT3 HCDR1
FAFSSYVLH

SEQ ID NO: 2068 - protein, 9 aa, synthetic construct
  REGION 1..9: note = Non-Selective Anti-FLT3 HCDR1
YTLTELSMH

SEQ ID NO: 2069 - protein, 9 aa, synthetic construct
  REGION 1..9: note = Non-Selective Anti-FLT3 HCDR1
FTFSNHYMS

SEQ ID NO: 2070 - protein, 9 aa, synthetic construct
  REGION 1..9: note = Non-Selective Anti-FLT3 HCDR1
YTFTGYYMH

SEQ ID NO: 2071 - protein, 9 aa, synthetic construct
  REGION 1..9: note = Non-Selective Anti-FLT3 HCDR1
YTFSRYYMS

SEQ ID NO: 2072 - protein, 9 aa, synthetic construct
  REGION 1..9: note = Non-Selective Anti-FLT3 HCDR1
YTFTTYYMH

SEQ ID NO: 2073 - protein, 9 aa, synthetic construct
  REGION 1..9: note = Non-Selective Anti-FLT3 HCDR1
YTFTGYRMH

SEQ ID NO: 2074 - protein, 9 aa, synthetic construct
  REGION 1..9: note = Non-Selective Anti-FLT3 HCDR1
NTFTMYYMH

SEQ ID NO: 2075 - protein, 9 aa, synthetic construct
  REGION 1..9: note = Non-Selective Anti-FLT3 HCDR1
YTFTTFYLH

SEQ ID NO: 2076 - protein, 9 aa, synthetic construct
  REGION 1..9: note = Non-Selective Anti-FLT3 HCDR1
YSFTTHYMH

SEQ ID NO: 2077 - protein, 9 aa, synthetic construct
  REGION 1..9: note = Non-Selective Anti-FLT3 HCDR1
YTFTNYYMH

SEQ ID NO: 2078 - protein, 9 aa, synthetic construct
  REGION 1..9: note = Non-Selective Anti-FLT3 HCDR1
YTFTGYYMY

SEQ ID NO: 2079 - protein, 9 aa, synthetic construct
  REGION 1..9: note = Non-Selective Anti-FLT3 HCDR1
YTFTDNYMH

SEQ ID NO: 2080 - protein, 9 aa, synthetic construct
  REGION 1..9: note = Non-Selective Anti-FLT3 HCDR1
YSFTAYYMH

SEQ ID NO: 2081 - protein, 9 aa, synthetic construct
  REGION 1..9: note = Non-Selective Anti-FLT3 HCDR1
YTFTNSFIH

SEQ ID NO: 2082 - protein, 9 aa, synthetic construct
  REGION 1..9: note = Non-Selective Anti-FLT3 HCDR1
YTFTGYYMH

SEQ ID NO: 2083 - protein, 9 aa, synthetic construct
  REGION 1..9: note = Non-Selective Anti-FLT3 HCDR1
YTLTELSIH

SEQ ID NO: 2084 - protein, 9 aa, synthetic construct
  REGION 1..9: note = Non-Selective Anti-FLT3 HCDR1
YTFTGYYMH

SEQ ID NO: 2085 - protein, 9 aa, synthetic construct
  REGION 1..9: note = Non-Selective Anti-FLT3 HCDR1
YTLNELFMH

SEQ ID NO: 2086 - protein, 9 aa, synthetic construct
  REGION 1..9: note = Non-Selective Anti-FLT3 HCDR1
GTFSSHAIS

SEQ ID NO: 2087 - protein, 9 aa, synthetic construct
  REGION 1..9: note = Non-Selective Anti-FLT3 HCDR1
YTFTNYYMH

SEQ ID NO: 2088 - protein, 9 aa, synthetic construct
  REGION 1..9: note = Non-Selective Anti-FLT3 HCDR1
GTFSSNAIN

SEQ ID NO: 2089 - protein, 9 aa, synthetic construct
  REGION 1..9: note = Non-Selective Anti-FLT3 HCDR1
YTFTSYYIH

SEQ ID NO: 2090 - protein, 9 aa, synthetic construct
  REGION 1..9: note = Non-Selective Anti-FLT3 HCDR1
YTFTSYGIH

SEQ ID NO: 2091 - protein, 9 aa, synthetic construct
  REGION 1..9: note = Non-Selective Anti-FLT3 HCDR1
YTFTSYYLH

SEQ ID NO: 2092 - protein, 9 aa, synthetic construct
  REGION 1..9: note = Non-Selective Anti-FLT3 HCDR1
HTFTAYYMH

SEQ ID NO: 2093 - protein, 9 aa, synthetic construct
  REGION 1..9: note = Non-Selective Anti-FLT3 HCDR1
YTFTGYYMH

SEQ ID NO: 2094 - protein, 9 aa, synthetic construct
  REGION 1..9: note = Non-Selective Anti-FLT3 HCDR1
GTFSSYAIS

SEQ ID NO: 2095 - protein, 9 aa, synthetic construct
  REGION 1..9: note = Non-Selective Anti-FLT3 HCDR1
YTFTSYYMH

SEQ ID NO: 2096 - protein, 9 aa, synthetic construct
  REGION 1..9: note = Non-Selective Anti-FLT3 HCDR1
YTFTIYYMH

SEQ ID NO: 2097 - protein, 9 aa, synthetic construct
  REGION 1..9: note = Non-Selective Anti-FLT3 HCDR1
GTFSSYAIS

SEQ ID NO: 2098 - protein, 9 aa, synthetic construct
  REGION 1..9: note = Non-Selective Anti-FLT3 HCDR1
YTFTSYYMH

SEQ ID NO: 2099 - protein, 9 aa, synthetic construct
  REGION 1..9: note = Non-Selective Anti-FLT3 HCDR1
YTFTRHYVH

SEQ ID NO: 2100 - protein, 9 aa, synthetic construct
  REGION 1..9: note = Non-Selective Anti-FLT3 HCDR1
GTFSSATIS

SEQ ID NO: 2101 - protein, 9 aa, synthetic construct
  REGION 1..9: note = Non-Selective Anti-FLT3 HCDR1
GTFSSHAFN

SEQ ID NO: 2102 - protein, 9 aa, synthetic construct
  REGION 1..9: note = Non-Selective Anti-FLT3 HCDR1
YTFTSYYMH

SEQ ID NO: 2103 - protein, 9 aa, synthetic construct
  REGION 1..9: note = Non-Selective Anti-FLT3 HCDR1
YTFTGFYIH

SEQ ID NO: 2104 - protein, 9 aa, synthetic construct
  REGION 1..9: note = Non-Selective Anti-FLT3 HCDR1
GTFTSYFMH

SEQ ID NO: 2105 - protein, 9 aa, synthetic construct
  REGION 1..9: note = Non-Selective Anti-FLT3 HCDR1
GTLMSYAIS

SEQ ID NO: 2106 - protein, 9 aa, synthetic construct
  REGION 1..9: note = Non-Selective Anti-FLT3 HCDR1
YTFTGYYMH

SEQ ID NO: 2107 - protein, 9 aa, synthetic construct
  REGION 1..9: note = Non-Selective Anti-FLT3 HCDR1
YTFTSDGIS

SEQ ID NO: 2108 - protein, 9 aa, synthetic construct
  REGION 1..9: note = Non-Selective Anti-FLT3 HCDR1
YTLTSFAMH

SEQ ID NO: 2109 - protein, 9 aa, synthetic construct
  REGION 1..9: note = Non-Selective Anti-FLT3 HCDR1
GTFSSDAIN

SEQ ID NO: 2110 - protein, 9 aa, synthetic construct
  REGION 1..9: note = Non-Selective Anti-FLT3 HCDR1
YTLTDLSIH

SEQ ID NO: 2111 - protein, 9 aa, synthetic construct
  REGION 1..9: note = Non-Selective Anti-FLT3 HCDR1
YTFTTYFMH

SEQ ID NO: 2112 - protein, 9 aa, synthetic construct
  REGION 1..9: note = Non-Selective Anti-FLT3 HCDR1
YTFTSHYMH

SEQ ID NO: 2113 - protein, 9 aa, synthetic construct
  REGION 1..9: note = Non-Selective Anti-FLT3 HCDR1
YTLTELSMH

SEQ ID NO: 2114 - protein, 9 aa, synthetic construct
  REGION 1..9: note = Non-Selective Anti-FLT3 HCDR1
YTFATYYLH

SEQ ID NO: 2115 - protein, 9 aa, synthetic construct
  REGION 1..9: note = Non-Selective Anti-FLT3 HCDR1
YTFTNYFMH

SEQ ID NO: 2116 - protein, 9 aa, synthetic construct
  REGION 1..9: note = Non-Selective Anti-FLT3 HCDR1
GTFGSYAIS

SEQ ID NO: 2117 - protein, 9 aa, synthetic construct
  REGION 1..9: note = Non-Selective Anti-FLT3 HCDR1
YTFTSSEIN

SEQ ID NO: 2118 - protein, 9 aa, synthetic construct
  REGION 1..9: note = Non-Selective Anti-FLT3 HCDR1
YTFTNYYVH

SEQ ID NO: 2119 - protein, 9 aa, synthetic construct
  REGION 1..9: note = Non-Selective Anti-FLT3 HCDR1
YTFTRYYMH

SEQ ID NO: 2120 - protein, 11 aa, synthetic construct
  REGION 1..11: note = Non-Selective Anti-FLT3 HCDR1
FTFSDYGYYMH

SEQ ID NO: 2121 - protein, 9 aa, synthetic construct
  REGION 1..9: note = Non-Selective Anti-FLT3 HCDR1
GTFSSYAIS

SEQ ID NO: 2122 - protein, 9 aa, synthetic construct
  REGION 1..9: note = Non-Selective Anti-FLT3 HCDR1
YTLTELSMH

SEQ ID NO: 2123 - protein, 9 aa, synthetic construct
  REGION 1..9: note = Non-Selective Anti-FLT3 HCDR1
HTFTSDYMH

SEQ ID NO: 2124 - protein, 9 aa, synthetic construct
  REGION 1..9: note = Non-Selective Anti-FLT3 HCDR1
YSLTELSIH

SEQ ID NO: 2125 - protein, 9 aa, synthetic construct
  REGION 1..9: note = Non-Selective Anti-FLT3 HCDR1
YTLTSFGIS

SEQ ID NO: 2126 - protein, 9 aa, synthetic construct
  REGION 1..9: note = Non-Selective Anti-FLT3 HCDR1
GTFSTYALS

SEQ ID NO: 2127 - protein, 9 aa, synthetic construct
  REGION 1..9: note = Non-Selective Anti-FLT3 HCDR1
GSFSSYALH

SEQ ID NO: 2128 - protein, 9 aa, synthetic construct
  REGION 1..9: note = Non-Selective Anti-FLT3 HCDR1
GTFSSYYMH

SEQ ID NO: 2129 - protein, 9 aa, synthetic construct
  REGION 1..9: note = Non-Selective Anti-FLT3 HCDR1
GTFSSYAIS

SEQ ID NO: 2130 - protein, 9 aa, synthetic construct
  REGION 1..9: note = Non-Selective Anti-FLT3 HCDR1
YIFTNYYIQ

SEQ ID NO: 2131 - protein, 9 aa, synthetic construct
  REGION 1..9: note = Non-Selective Anti-FLT3 HCDR1
DTFNSYAVN

SEQ ID NO: 2132 - protein, 9 aa, synthetic construct
  REGION 1..9: note = Non-Selective Anti-FLT3 HCDR1
YTFTYRYLH

SEQ ID NO: 2133 - protein, 9 aa, synthetic construct
  REGION 1..9: note = Non-Selective Anti-FLT3 HCDR1
YTFTSYYMH

SEQ ID NO: 2134 - protein, 9 aa, synthetic construct
  REGION 1..9: note = Non-Selective Anti-FLT3 HCDR1
YTFTRFNIH

SEQ ID NO: 2135 - protein, 9 aa, synthetic construct
  REGION 1..9: note = Non-Selective Anti-FLT3 HCDR1
YTFTGYYMH

SEQ ID NO: 2136 - protein, 9 aa, synthetic construct
  REGION 1..9: note = Non-Selective Anti-FLT3 HCDR1
YTFTSYYMH

SEQ ID NO: 2137 - protein, 9 aa, synthetic construct
  REGION 1..9: note = Non-Selective Anti-FLT3 HCDR1
YTFTKYYMH

SEQ ID NO: 2138 - protein, 9 aa, synthetic construct
  REGION 1..9: note = Non-Selective Anti-FLT3 HCDR1
YTFTRYYMH

SEQ ID NO: 2139 - protein, 9 aa, synthetic construct
  REGION 1..9: note = Non-Selective Anti-FLT3 HCDR1
YTFNSYGIS

SEQ ID NO: 2140 - protein, 9 aa, synthetic construct
  REGION 1..9: note = Non-Selective Anti-FLT3 HCDR1
GTFSSYAIS

SEQ ID NO: 2141 - protein, 9 aa, synthetic construct
  REGION 1..9: note = Non-Selective Anti-FLT3 HCDR1
YTFTSYYMD

SEQ ID NO: 2142 - protein, 9 aa, synthetic construct
  REGION 1..9: note = Non-Selective Anti-FLT3 HCDR1
YTFTSYYMH

SEQ ID NO: 2143 - protein, 9 aa, synthetic construct
  REGION 1..9: note = Non-Selective Anti-FLT3 HCDR1
YSFTNYYMH

SEQ ID NO: 2144 - protein, 9 aa, synthetic construct
  REGION 1..9: note = Non-Selective Anti-FLT3 HCDR1
YTFTSYGIS

SEQ ID NO: 2145 - protein, 9 aa, synthetic construct
  REGION 1..9: note = Non-Selective Anti-FLT3 HCDR1
YTFTRHYVH

SEQ ID NO: 2146 - protein, 9 aa, synthetic construct
  REGION 1..9: note = Non-Selective Anti-FLT3 HCDR1
YTFTTYDIN

SEQ ID NO: 2147 - protein, 9 aa, synthetic construct
  REGION 1..9: note = Non-Selective Anti-FLT3 HCDR1
YTFTSYGIS

SEQ ID NO: 2148 - protein, 9 aa, synthetic construct
  REGION 1..9: note = Non-Selective Anti-FLT3 HCDR1
GTFTSYYMH

SEQ ID NO: 2149 - protein, 9 aa, synthetic construct
  REGION 1..9: note = Non-Selective Anti-FLT3 HCDR1
YTFTSYYMH

SEQ ID NO: 2150 - protein, 9 aa, synthetic construct
  REGION 1..9: note = Non-Selective Anti-FLT3 HCDR1
YTFTSYGIS

SEQ ID NO: 2151 - protein, 9 aa, synthetic construct
  REGION 1..9: note = Non-Selective Anti-FLT3 HCDR1
YMFTTPYIH

SEQ ID NO: 2152 - protein, 9 aa, synthetic construct
  REGION 1..9: note = Non-Selective Anti-FLT3 HCDR1
YTFTSNNMH

SEQ ID NO: 2153 - protein, 13 aa, synthetic construct
  REGION 1..13: note = Non-Selective Anti-FLT3 HCDR2
GWISAYHGHTNYA

SEQ ID NO: 2154 - protein, 13 aa, synthetic construct
  REGION 1..13: note = Non-Selective Anti-FLT3 HCDR2
GVINPSGGSTNYA

SEQ ID NO: 2155 - protein, 13 aa, synthetic construct
  REGION 1..13: note = Non-Selective Anti-FLT3 HCDR2
GRIIPISGTANYA

SEQ ID NO: 2156 - protein, 13 aa, synthetic construct
  REGION 1..13: note = Non-Selective Anti-FLT3 HCDR2
SGISGSGRSKYYA

SEQ ID NO: 2157 - protein, 13 aa, synthetic construct
  REGION 1..13: note = Non-Selective Anti-FLT3 HCDR2
GGIIPISGTANYA

SEQ ID NO: 2158 - protein, 13 aa, synthetic construct
  REGION 1..13: note = Non-Selective Anti-FLT3 HCDR2
GGIIPIFGKAEYS

SEQ ID NO: 2159 - protein, 13 aa, synthetic construct
  REGION 1..13: note = Non-Selective Anti-FLT3 HCDR2
GWMNPNSGNTGYA

SEQ ID NO: 2160 - protein, 13 aa, synthetic construct
  REGION 1..13: note = Non-Selective Anti-FLT3 HCDR2
GIINPSGGGTLYA

SEQ ID NO: 2161 - protein, 13 aa, synthetic construct
  REGION 1..13: note = Non-Selective Anti-FLT3 HCDR2
AGIWVDGHNKDYA

SEQ ID NO: 2162 - protein, 13 aa, synthetic construct
  REGION 1..13: note = Non-Selective Anti-FLT3 HCDR2
GGIIPISGTTKYA

SEQ ID NO: 2163 - protein, 12 aa, synthetic construct
  REGION 1..12: note = Non-Selective Anti-FLT3 HCDR2
SAIGAGGGTYYA

SEQ ID NO: 2164 - protein, 13 aa, synthetic construct
  REGION 1..13: note = Non-Selective Anti-FLT3 HCDR2
GGIIPILGTANNA

SEQ ID NO: 2165 - protein, 13 aa, synthetic construct
  REGION 1..13: note = Non-Selective Anti-FLT3 HCDR2
GWMNPNSGNTGYA

SEQ ID NO: 2166 - protein, 13 aa, synthetic construct
  REGION 1..13: note = Non-Selective Anti-FLT3 HCDR2
GIINPSGGSTSYA

SEQ ID NO: 2167 - protein, 13 aa, synthetic construct
  REGION 1..13: note = Non-Selective Anti-FLT3 HCDR2
GWINPNSGGTNYA

SEQ ID NO: 2168 - protein, 13 aa, synthetic construct
  REGION 1..13: note = Non-Selective Anti-FLT3 HCDR2
GAIIPISGTVIYA

SEQ ID NO: 2169 - protein, 13 aa, synthetic construct
  REGION 1..13: note = Non-Selective Anti-FLT3 HCDR2
GGIIPMSGTANYA

SEQ ID NO: 2170 - protein, 13 aa, synthetic construct
  REGION 1..13: note = Non-Selective Anti-FLT3 HCDR2
GIINPSGGSTRYA

SEQ ID NO: 2171 - protein, 13 aa, synthetic construct
  REGION 1..13: note = Non-Selective Anti-FLT3 HCDR2
GIINPSSGSASYT

SEQ ID NO: 2172 - protein, 13 aa, synthetic construct
  REGION 1..13: note = Non-Selective Anti-FLT3 HCDR2
GIINPRGGITSYA

SEQ ID NO: 2173 - protein, 13 aa, synthetic construct
  REGION 1..13: note = Non-Selective Anti-FLT3 HCDR2
GWMTPDSNNTGFA

SEQ ID NO: 2174 - protein, 13 aa, synthetic construct
  REGION 1..13: note = Non-Selective Anti-FLT3 HCDR2
GIINPSGGSTSYA

SEQ ID NO: 2175 - protein, 13 aa, synthetic construct
  REGION 1..13: note = Non-Selective Anti-FLT3 HCDR2
GIINPSGGSTSYA

SEQ ID NO: 2176 - protein, 13 aa, synthetic construct
  REGION 1..13: note = Non-Selective Anti-FLT3 HCDR2
GVINPIYGTANYA

SEQ ID NO: 2177 - protein, 13 aa, synthetic construct
  REGION 1..13: note = Non-Selective Anti-FLT3 HCDR2
GGIVPMSGTASYA

SEQ ID NO: 2178 - protein, 13 aa, synthetic construct
  REGION 1..13: note = Non-Selective Anti-FLT3 HCDR2
GIIDPSGGSTSYA

SEQ ID NO: 2179 - protein, 13 aa, synthetic construct
  REGION 1..13: note = Non-Selective Anti-FLT3 HCDR2
GGIIPMSGTTFYA

SEQ ID NO: 2180 - protein, 13 aa, synthetic construct
  REGION 1..13: note = Non-Selective Anti-FLT3 HCDR2
GWINPGSGGTNYA

SEQ ID NO: 2181 - protein, 13 aa, synthetic construct
  REGION 1..13: note = Non-Selective Anti-FLT3 HCDR2
GIINPSGGSTSYA

SEQ ID NO: 2182 - protein, 13 aa, synthetic construct
  REGION 1..13: note = Non-Selective Anti-FLT3 HCDR2
GGIIPLFGTTNYA

SEQ ID NO: 2183 - protein, 13 aa, synthetic construct
  REGION 1..13: note = Non-Selective Anti-FLT3 HCDR2
GLINPSGGSTTYA

SEQ ID NO: 2184 - protein, 13 aa, synthetic construct
  REGION 1..13: note = Non-Selective Anti-FLT3 HCDR2
GGIIPIFGTASYA

SEQ ID NO: 2185 - protein, 13 aa, synthetic construct
  REGION 1..13: note = Non-Selective Anti-FLT3 HCDR2
GVINPSGGSTTYA

SEQ ID NO: 2186 - protein, 13 aa, synthetic construct
  REGION 1..13: note = Non-Selective Anti-FLT3 HCDR2
GWMSPYSGNTGYA

SEQ ID NO: 2187 - protein, 13 aa, synthetic construct
  REGION 1..13: note = Non-Selective Anti-FLT3 HCDR2
GIINPSGGSTSYA

SEQ ID NO: 2188 - protein, 13 aa, synthetic construct
  REGION 1..13: note = Non-Selective Anti-FLT3 HCDR2
GGIIPILGIANYA

SEQ ID NO: 2189 - protein, 13 aa, synthetic construct
  REGION 1..13: note = Non-Selective Anti-FLT3 HCDR2
GLINPSSGSTSYA

SEQ ID NO: 2190 - protein, 13 aa, synthetic construct
  REGION 1..13: note = Non-Selective Anti-FLT3 HCDR2
GIINPSGGSTVYA

SEQ ID NO: 2191 - protein, 13 aa, synthetic construct
  REGION 1..13: note = Non-Selective Anti-FLT3 HCDR2
GGIIPILGTANYA

SEQ ID NO: 2192 - protein, 13 aa, synthetic construct
  REGION 1..13: note = Non-Selective Anti-FLT3 HCDR2
GIINPSSGSTTYA

SEQ ID NO: 2193 - protein, 13 aa, synthetic construct
  REGION 1..13: note = Non-Selective Anti-FLT3 HCDR2
GIINPSGGSTSYA

SEQ ID NO: 2194 - protein, 13 aa, synthetic construct
  REGION 1..13: note = Non-Selective Anti-FLT3 HCDR2
GGIIPMFGTANYA

SEQ ID NO: 2195 - protein, 13 aa, synthetic construct
  REGION 1..13: note = Non-Selective Anti-FLT3 HCDR2
GGISPMFGTPNYA

SEQ ID NO: 2196 - protein, 13 aa, synthetic construct
  REGION 1..13: note = Non-Selective Anti-FLT3 HCDR2
GRINPSGGSTSYA

SEQ ID NO: 2197 - protein, 13 aa, synthetic construct
  REGION 1..13: note = Non-Selective Anti-FLT3 HCDR2
GGVIPFFSRTIYA

SEQ ID NO: 2198 - protein, 13 aa, synthetic construct
  REGION 1..13: note = Non-Selective Anti-FLT3 HCDR2
GGIIPMFGAPVYA

SEQ ID NO: 2199 - protein, 13 aa, synthetic construct
  REGION 1..13: note = Non-Selective Anti-FLT3 HCDR2
GIINPRGGTTRYA

SEQ ID NO: 2200 - protein, 13 aa, synthetic construct
  REGION 1..13: note = Non-Selective Anti-FLT3 HCDR2
GVINPNGGSISYA

SEQ ID NO: 2201 - protein, 13 aa, synthetic construct
  REGION 1..13: note = Non-Selective Anti-FLT3 HCDR2
GWMNPNSGNAGYA

SEQ ID NO: 2202 - protein, 13 aa, synthetic construct
  REGION 1..13: note = Non-Selective Anti-FLT3 HCDR2
GRIIPMSGTANYA

SEQ ID NO: 2203 - protein, 13 aa, synthetic construct
  REGION 1..13: note = Non-Selective Anti-FLT3 HCDR2
GGIIPIVGTPTYA

SEQ ID NO: 2204 - protein, 13 aa, synthetic construct
  REGION 1..13: note = Non-Selective Anti-FLT3 HCDR2
GGIIPMSGTANYA

SEQ ID NO: 2205 - protein, 13 aa, synthetic construct
  REGION 1..13: note = Non-Selective Anti-FLT3 HCDR2
GGIVPVFGTTKYA

SEQ ID NO: 2206 - protein, 13 aa, synthetic construct
  REGION 1..13: note = Non-Selective Anti-FLT3 HCDR2
GWISPYNGNTNYA

SEQ ID NO: 2207 - protein, 13 aa, synthetic construct
  REGION 1..13: note = Non-Selective Anti-FLT3 HCDR2
GGIIPISGTVTYA

SEQ ID NO: 2208 - protein, 13 aa, synthetic construct
  REGION 1..13: note = Non-Selective Anti-FLT3 HCDR2
GMINPSGGSTIYA

SEQ ID NO: 2209 - protein, 13 aa, synthetic construct
  REGION 1..13: note = Non-Selective Anti-FLT3 HCDR2
GIINPSGGSTSYA

SEQ ID NO: 2210 - protein, 13 aa, synthetic construct
  REGION 1..13: note = Non-Selective Anti-FLT3 HCDR2
GWINPNTGGAHYA

SEQ ID NO: 2211 - protein, 13 aa, synthetic construct
  REGION 1..13: note = Non-Selective Anti-FLT3 HCDR2
GGIHPMFGTTNYA

SEQ ID NO: 2212 - protein, 13 aa, synthetic construct
  REGION 1..13: note = Non-Selective Anti-FLT3 HCDR2
GMINPSGGSTNYA

SEQ ID NO: 2213 - protein, 13 aa, synthetic construct
  REGION 1..13: note = Non-Selective Anti-FLT3 HCDR2
GIINPSGGSASYA

SEQ ID NO: 2214 - protein, 13 aa, synthetic construct
  REGION 1..13: note = Non-Selective Anti-FLT3 HCDR2
GWMDPSSGHTGYA

SEQ ID NO: 2215 - protein, 13 aa, synthetic construct
  REGION 1..13: note = Non-Selective Anti-FLT3 HCDR2
GGIIPIVGVANYA

SEQ ID NO: 2216 - protein, 13 aa, synthetic construct
  REGION 1..13: note = Non-Selective Anti-FLT3 HCDR2
GGIIPISSATSIP

SEQ ID NO: 2217 - protein, 13 aa, synthetic construct
  REGION 1..13: note = Non-Selective Anti-FLT3 HCDR2
GRIIPIFGTADYA

SEQ ID NO: 2218 - protein, 13 aa, synthetic construct
  REGION 1..13: note = Non-Selective Anti-FLT3 HCDR2
GGINPISGTANYA

SEQ ID NO: 2219 - protein, 13 aa, synthetic construct
  REGION 1..13: note = Non-Selective Anti-FLT3 HCDR2
GMIIPLSGTTHYA

SEQ ID NO: 2220 - protein, 13 aa, synthetic construct
  REGION 1..13: note = Non-Selective Anti-FLT3 HCDR2
GGVIPVFGTTDYA

SEQ ID NO: 2221 - protein, 13 aa, synthetic construct
  REGION 1..13: note = Non-Selective Anti-FLT3 HCDR2
GLINPSGGRTSYA

SEQ ID NO: 2222 - protein, 13 aa, synthetic construct
  REGION 1..13: note = Non-Selective Anti-FLT3 HCDR2
GWISAYNGNTNYA

SEQ ID NO: 2223 - protein, 13 aa, synthetic construct
  REGION 1..13: note = Non-Selective Anti-FLT3 HCDR2
GGIIPIFGTANYA

SEQ ID NO: 2224 - protein, 13 aa, synthetic construct
  REGION 1..13: note = Non-Selective Anti-FLT3 HCDR2
GGIIPIFGTVGYA

SEQ ID NO: 2225 - protein, 13 aa, synthetic construct
  REGION 1..13: note = Non-Selective Anti-FLT3 HCDR2
GGIIPSFGTPTYA

SEQ ID NO: 2226 - protein, 13 aa, synthetic construct
  REGION 1..13: note = Non-Selective Anti-FLT3 HCDR2
GRITPISGTTNYA

SEQ ID NO: 2227 - protein, 13 aa, synthetic construct
  REGION 1..13: note = Non-Selective Anti-FLT3 HCDR2
GWMNPYSGNTGYA

SEQ ID NO: 2228 - protein, 13 aa, synthetic construct
  REGION 1..13: note = Non-Selective Anti-FLT3 HCDR2
GWLNPFTGNTGYA

SEQ ID NO: 2229 - protein, 13 aa, synthetic construct
  REGION 1..13: note = Non-Selective Anti-FLT3 HCDR2
GWIDPNSGGTNYA

SEQ ID NO: 2230 - protein, 13 aa, synthetic construct
  REGION 1..13: note = Non-Selective Anti-FLT3 HCDR2
GIINPSSGSTTYA

SEQ ID NO: 2231 - protein, 13 aa, synthetic construct
  REGION 1..13: note = Non-Selective Anti-FLT3 HCDR2
GIINPSGGSTSYA

SEQ ID NO: 2232 - protein, 13 aa, synthetic construct
  REGION 1..13: note = Non-Selective Anti-FLT3 HCDR2
GIINPSGGSTSYA

SEQ ID NO: 2233 - protein, 13 aa, synthetic construct
  REGION 1..13: note = Non-Selective Anti-FLT3 HCDR2
GIINPTGGSTTYA

SEQ ID NO: 2234 - protein, 13 aa, synthetic construct
  REGION 1..13: note = Non-Selective Anti-FLT3 HCDR2
GWMNPNSGDTGYA

SEQ ID NO: 2235 - protein, 13 aa, synthetic construct
  REGION 1..13: note = Non-Selective Anti-FLT3 HCDR2
GRINPSSGSTTYV

SEQ ID NO: 2236 - protein, 13 aa, synthetic construct
  REGION 1..13: note = Non-Selective Anti-FLT3 HCDR2
GVINPSGGSTTYA

SEQ ID NO: 2237 - protein, 13 aa, synthetic construct
  REGION 1..13: note = Non-Selective Anti-FLT3 HCDR2
GGIIPVFGTTTYS

SEQ ID NO: 2238 - protein, 13 aa, synthetic construct
  REGION 1..13: note = Non-Selective Anti-FLT3 HCDR2
GWISPNSGVTNYA

SEQ ID NO: 2239 - protein, 13 aa, synthetic construct
  REGION 1..13: note = Non-Selective Anti-FLT3 HCDR2
GIINPSSGSASYA

SEQ ID NO: 2240 - protein, 13 aa, synthetic construct
  REGION 1..13: note = Non-Selective Anti-FLT3 HCDR2
GWMNPSSGNSGFA

SEQ ID NO: 2241 - protein, 13 aa, synthetic construct
  REGION 1..13: note = Non-Selective Anti-FLT3 HCDR2
GWMNPISGNTDYA

SEQ ID NO: 2242 - protein, 13 aa, synthetic construct
  REGION 1..13: note = Non-Selective Anti-FLT3 HCDR2
GWISAYNGKTDYA

SEQ ID NO: 2243 - protein, 13 aa, synthetic construct
  REGION 1..13: note = Non-Selective Anti-FLT3 HCDR2
GIINPSGGSTVYA

SEQ ID NO: 2244 - protein, 13 aa, synthetic construct
  REGION 1..13: note = Non-Selective Anti-FLT3 HCDR2
GWINPNSGGTNYA

SEQ ID NO: 2245 - protein, 13 aa, synthetic construct
  REGION 1..13: note = Non-Selective Anti-FLT3 HCDR2
GVINPISGTTTYA

SEQ ID NO: 2246 - protein, 13 aa, synthetic construct
  REGION 1..13: note = Non-Selective Anti-FLT3 HCDR2
GWINLNSGGTNYA

SEQ ID NO: 2247 - protein, 21 aa, synthetic construct
  REGION 1..21: note = Non-Selective Anti-FLT3 HCDR3
CARGGKHSGSHRSYYYGMDVW

SEQ ID NO: 2248 - protein, 12 aa, synthetic construct
  REGION 1..12: note = Non-Selective Anti-FLT3 HCDR3
CARAGVGAFHIW

SEQ ID NO: 2249 - protein, 22 aa, synthetic construct
  REGION 1..22: note = Non-Selective Anti-FLT3 HCDR3
CARAARYCSSTSCYWRDGMDVW

SEQ ID NO: 2250 - protein, 19 aa, synthetic construct
  REGION 1..19: note = Non-Selective Anti-FLT3 HCDR3
CARVYYDSSGYYPYYFDYW

SEQ ID NO: 2251 - protein, 16 aa, synthetic construct
  REGION 1..16: note = Non-Selective Anti-FLT3 HCDR3
CAKGRGQLVGGYFQHW

SEQ ID NO: 2252 - protein, 16 aa, synthetic construct
  REGION 1..16: note = Non-Selective Anti-FLT3 HCDR3
CAREDFWSGPYGMDVW

SEQ ID NO: 2253 - protein, 15 aa, synthetic construct
  REGION 1..15: note = Non-Selective Anti-FLT3 HCDR3
CAKSHYYYFYGMDVW

SEQ ID NO: 2254 - protein, 15 aa, synthetic construct
  REGION 1..15: note = Non-Selective Anti-FLT3 HCDR3
CAKDMDGWSDAFDIW

SEQ ID NO: 2255 - protein, 14 aa, synthetic construct
  REGION 1..14: note = Non-Selective Anti-FLT3 HCDR3
CAREFGAAGSFQHW

SEQ ID NO: 2256 - protein, 13 aa, synthetic construct
  REGION 1..13: note = Non-Selective Anti-FLT3 HCDR3
CARASPRYYMDVW

SEQ ID NO: 2257 - protein, 17 aa, synthetic construct
  REGION 1..17: note = Non-Selective Anti-FLT3 HCDR3
CAKSSGYSYGRRPFDYW

SEQ ID NO: 2258 - protein, 12 aa, synthetic construct
  REGION 1..12: note = Non-Selective Anti-FLT3 HCDR3
CARAPWGTFDYW

SEQ ID NO: 2259 - protein, 18 aa, synthetic construct
  REGION 1..18: note = Non-Selective Anti-FLT3 HCDR3
CARTRFAAQPHNWHFDLW

SEQ ID NO: 2260 - protein, 16 aa, synthetic construct
  REGION 1..16: note = Non-Selective Anti-FLT3 HCDR3
CARDRAARPRGGFDYW

SEQ ID NO: 2261 - protein, 16 aa, synthetic construct
  REGION 1..16: note = Non-Selective Anti-FLT3 HCDR3
CAKGGLDWRNWYFDLW

SEQ ID NO: 2262 - protein, 16 aa, synthetic construct
  REGION 1..16: note = Non-Selective Anti-FLT3 HCDR3
CARLSGGRMYDAFDIW

SEQ ID NO: 2263 - protein, 12 aa, synthetic construct
  REGION 1..12: note = Non-Selective Anti-FLT3 HCDR3
CASGGENGMDVW

SEQ ID NO: 2264 - protein, 15 aa, synthetic construct
  REGION 1..15: note = Non-Selective Anti-FLT3 HCDR3
CARGSSYYYYGVDVW

SEQ ID NO: 2265 - protein, 14 aa, synthetic construct
  REGION 1..14: note = Non-Selective Anti-FLT3 HCDR3
CARDRSTLVPLDYW

SEQ ID NO: 2266 - protein, 18 aa, synthetic construct
  REGION 1..18: note = Non-Selective Anti-FLT3 HCDR3
CARGSTSSGWPNGDMDVW

SEQ ID NO: 2267 - protein, 13 aa, synthetic construct
  REGION 1..13: note = Non-Selective Anti-FLT3 HCDR3
CALGDGPFGMDVW

SEQ ID NO: 2268 - protein, 14 aa, synthetic construct
  REGION 1..14: note = Non-Selective Anti-FLT3 HCDR3
CARVAGINGEMAYW

SEQ ID NO: 2269 - protein, 16 aa, synthetic construct
  REGION 1..16: note = Non-Selective Anti-FLT3 HCDR3
CAKALERRYYYGMDVW

SEQ ID NO: 2270 - protein, 17 aa, synthetic construct
  REGION 1..17: note = Non-Selective Anti-FLT3 HCDR3
CAKAISSGWSNDAFDIW

SEQ ID NO: 2271 - protein, 11 aa, synthetic construct
  REGION 1..11: note = Non-Selective Anti-FLT3 HCDR3
CARRRDGYNSW

SEQ ID NO: 2272 - protein, 18 aa, synthetic construct
  REGION 1..18: note = Non-Selective Anti-FLT3 HCDR3
CARDRSLLWSGVGGMDVW

SEQ ID NO: 2273 - protein, 20 aa, synthetic construct
  REGION 1..20: note = Non-Selective Anti-FLT3 HCDR3
CAKGVRQYSYGRYYYGMDVW

SEQ ID NO: 2274 - protein, 17 aa, synthetic construct
  REGION 1..17: note = Non-Selective Anti-FLT3 HCDR3
CAKDSYDFWSGYYIDYW

SEQ ID NO: 2275 - protein, 15 aa, synthetic construct
  REGION 1..15: note = Non-Selective Anti-FLT3 HCDR3
CARGVGYSGYGADLW

SEQ ID NO: 2276 - protein, 17 aa, synthetic construct
  REGION 1..17: note = Non-Selective Anti-FLT3 HCDR3
CARVLSGWYGTYYFDYW

SEQ ID NO: 2277 - protein, 19 aa, synthetic construct
  REGION 1..19: note = Non-Selective Anti-FLT3 HCDR3
CARGLGWGVVVPAAELDYW

SEQ ID NO: 2278 - protein, 19 aa, synthetic construct
  REGION 1..19: note = Non-Selective Anti-FLT3 HCDR3
CTRSNGIAAAGTHWYFDLW

SEQ ID NO: 2279 - protein, 14 aa, synthetic construct
  REGION 1..14: note = Non-Selective Anti-FLT3 HCDR3
CARGIGYGGYFDYW

SEQ ID NO: 2280 - protein, 12 aa, synthetic construct
  REGION 1..12: note = Non-Selective Anti-FLT3 HCDR3
CARATRGTIQHW

SEQ ID NO: 2281 - protein, 14 aa, synthetic construct
  REGION 1..14: note = Non-Selective Anti-FLT3 HCDR3
CARDPGRLGELDYW

SEQ ID NO: 2282 - protein, 12 aa, synthetic construct
  REGION 1..12: note = Non-Selective Anti-FLT3 HCDR3
CAHVDGYGMDVW

SEQ ID NO: 2283 - protein, 16 aa, synthetic construct
  REGION 1..16: note = Non-Selective Anti-FLT3 HCDR3
CARSGSGGSYFLFDYW

SEQ ID NO: 2284 - protein, 14 aa, synthetic construct
  REGION 1..14: note = Non-Selective Anti-FLT3 HCDR3
CARGIGSKGAFDIW

SEQ ID NO: 2285 - protein, 17 aa, synthetic construct
  REGION 1..17: note = Non-Selective Anti-FLT3 HCDR3
CARTMTTVTYYDAFDIW

SEQ ID NO: 2286 - protein, 13 aa, synthetic construct
  REGION 1..13: note = Non-Selective Anti-FLT3 HCDR3
CARGLGKSAIDYW

SEQ ID NO: 2287 - protein, 15 aa, synthetic construct
  REGION 1..15: note = Non-Selective Anti-FLT3 HCDR3
CARSYHHYYYGMDVW

SEQ ID NO: 2288 - protein, 11 aa, synthetic construct
  REGION 1..11: note = Non-Selective Anti-FLT3 HCDR3
CARDAYGDSTW

SEQ ID NO: 2289 - protein, 16 aa, synthetic construct
  REGION 1..16: note = Non-Selective Anti-FLT3 HCDR3
CARAPDYGDDWYFDLW

SEQ ID NO: 2290 - protein, 15 aa, synthetic construct
  REGION 1..15: note = Non-Selective Anti-FLT3 HCDR3
CARVPGLYGGAIDYW

SEQ ID NO: 2291 - protein, 15 aa, synthetic construct
  REGION 1..15: note = Non-Selective Anti-FLT3 HCDR3
CAYGANGHLYGMDAW

SEQ ID NO: 2292 - protein, 19 aa, synthetic construct
  REGION 1..19: note = Non-Selective Anti-FLT3 HCDR3
CAAGLDFWSGPDNYYMDVW

SEQ ID NO: 2293 - protein, 15 aa, synthetic construct
  REGION 1..15: note = Non-Selective Anti-FLT3 HCDR3
CARSEDSGYDYLDYW

SEQ ID NO: 2294 - protein, 15 aa, synthetic construct
  REGION 1..15: note = Non-Selective Anti-FLT3 HCDR3
CAREGWFGEDGMDVW

SEQ ID NO: 2295 - protein, 14 aa, synthetic construct
  REGION 1..14: note = Non-Selective Anti-FLT3 HCDR3
CATAVAGTDAFDIW

SEQ ID NO: 2296 - protein, 16 aa, synthetic construct
  REGION 1..16: note = Non-Selective Anti-FLT3 HCDR3
CASTSPDQYYYGMDVW

SEQ ID NO: 2297 - protein, 16 aa, synthetic construct
  REGION 1..16: note = Non-Selective Anti-FLT3 HCDR3
CAKGLAFGVFDGLDVW

SEQ ID NO: 2298 - protein, 15 aa, synthetic construct
  REGION 1..15: note = Non-Selective Anti-FLT3 HCDR3
CARSSSSWPKYFQHW

SEQ ID NO: 2299 - protein, 12 aa, synthetic construct
  REGION 1..12: note = Non-Selective Anti-FLT3 HCDR3
CASSAVGWFDPW

SEQ ID NO: 2300 - protein, 16 aa, synthetic construct
  REGION 1..16: note = Non-Selective Anti-FLT3 HCDR3
CARGESNSGWINFDYW

SEQ ID NO: 2301 - protein, 16 aa, synthetic construct
  REGION 1..16: note = Non-Selective Anti-FLT3 HCDR3
CANKGQQLVRGYFQHW

SEQ ID NO: 2302 - protein, 13 aa, synthetic construct
  REGION 1..13: note = Non-Selective Anti-FLT3 HCDR3
CARSSGYDFFDYW

SEQ ID NO: 2303 - protein, 15 aa, synthetic construct
  REGION 1..15: note = Non-Selective Anti-FLT3 HCDR3
CARAHTVYYYGMDVW

SEQ ID NO: 2304 - protein, 13 aa, synthetic construct
  REGION 1..13: note = Non-Selective Anti-FLT3 HCDR3
CARVGAAAGYQHW

SEQ ID NO: 2305 - protein, 15 aa, synthetic construct
  REGION 1..15: note = Non-Selective Anti-FLT3 HCDR3
CARARLMVYAPSDYW

SEQ ID NO: 2306 - protein, 15 aa, synthetic construct
  REGION 1..15: note = Non-Selective Anti-FLT3 HCDR3
CARVSGWKRGWFDPW

SEQ ID NO: 2307 - protein, 16 aa, synthetic construct
  REGION 1..16: note = Non-Selective Anti-FLT3 HCDR3
CARDLGGAAAGYFDYW

SEQ ID NO: 2308 - protein, 13 aa, synthetic construct
  REGION 1..13: note = Non-Selective Anti-FLT3 HCDR3
CAKDIGWGAFDIW

SEQ ID NO: 2309 - protein, 16 aa, synthetic construct
  REGION 1..16: note = Non-Selective Anti-FLT3 HCDR3
CAKDIGGYPSDAFDIW

SEQ ID NO: 2310 - protein, 25 aa, synthetic construct
  REGION 1..25: note = Non-Selective Anti-FLT3 HCDR3
CARGALYSSSPVRVVAGTKGWFDPW

SEQ ID NO: 2311 - protein, 13 aa, synthetic construct
  REGION 1..13: note = Non-Selective Anti-FLT3 HCDR3
CARDDSSGIFDYW

SEQ ID NO: 2312 - protein, 14 aa, synthetic construct
  REGION 1..14: note = Non-Selective Anti-FLT3 HCDR3
CARGTVRLNWFDPW

SEQ ID NO: 2313 - protein, 18 aa, synthetic construct
  REGION 1..18: note = Non-Selective Anti-FLT3 HCDR3
CANLYGGNAYYYYGMDVW

SEQ ID NO: 2314 - protein, 20 aa, synthetic construct
  REGION 1..20: note = Non-Selective Anti-FLT3 HCDR3
CASMIIFGAGGWDAYYFQEW

SEQ ID NO: 2315 - protein, 13 aa, synthetic construct
  REGION 1..13: note = Non-Selective Anti-FLT3 HCDR3
CARDEGYATFDYW

SEQ ID NO: 2316 - protein, 18 aa, synthetic construct
  REGION 1..18: note = Non-Selective Anti-FLT3 HCDR3
CAKDMGYYYDSSGGFDYW

SEQ ID NO: 2317 - protein, 17 aa, synthetic construct
  REGION 1..17: note = Non-Selective Anti-FLT3 HCDR3
CARDLSIGYYGDAFDIW

SEQ ID NO: 2318 - protein, 13 aa, synthetic construct
  REGION 1..13: note = Non-Selective Anti-FLT3 HCDR3
CARGRIGGGNDYW

SEQ ID NO: 2319 - protein, 12 aa, synthetic construct
  REGION 1..12: note = Non-Selective Anti-FLT3 HCDR3
CASVSYGSFDYW

SEQ ID NO: 2320 - protein, 16 aa, synthetic construct
  REGION 1..16: note = Non-Selective Anti-FLT3 HCDR3
CAKDSGQLAHYGMDVW

SEQ ID NO: 2321 - protein, 13 aa, synthetic construct
  REGION 1..13: note = Non-Selective Anti-FLT3 HCDR3
CARVGSGWYSDYW

SEQ ID NO: 2322 - protein, 14 aa, synthetic construct
  REGION 1..14: note = Non-Selective Anti-FLT3 HCDR3
CASSSSWYGWFDPW

SEQ ID NO: 2323 - protein, 14 aa, synthetic construct
  REGION 1..14: note = Non-Selective Anti-FLT3 HCDR3
CARDVDTAMVTDYW

SEQ ID NO: 2324 - protein, 14 aa, synthetic construct
  REGION 1..14: note = Non-Selective Anti-FLT3 HCDR3
CARSVGATSAFDIW

SEQ ID NO: 2325 - protein, 15 aa, synthetic construct
  REGION 1..15: note = Non-Selective Anti-FLT3 HCDR3
CARGRGYSYGYLDYW

SEQ ID NO: 2326 - protein, 17 aa, synthetic construct
  REGION 1..17: note = Non-Selective Anti-FLT3 HCDR3
CARGETRSYAPYGMDVW

SEQ ID NO: 2327 - protein, 11 aa, synthetic construct
  REGION 1..11: note = Non-Selective Anti-FLT3 HCDR3
CAKDPFVMDVW

SEQ ID NO: 2328 - protein, 14 aa, synthetic construct
  REGION 1..14: note = Non-Selective Anti-FLT3 HCDR3
CARDFEGGGWFDPW

SEQ ID NO: 2329 - protein, 15 aa, synthetic construct
  REGION 1..15: note = Non-Selective Anti-FLT3 HCDR3
CARTPSGSYSDFDYW

SEQ ID NO: 2330 - protein, 17 aa, synthetic construct
  REGION 1..17: note = Non-Selective Anti-FLT3 HCDR3
CARVPGVSPGDYGMDVW

SEQ ID NO: 2331 - protein, 13 aa, synthetic construct
  REGION 1..13: note = Non-Selective Anti-FLT3 HCDR3
CARESQDGDFDYW

SEQ ID NO: 2332 - protein, 12 aa, synthetic construct
  REGION 1..12: note = Non-Selective Anti-FLT3 HCDR3
CVSDDYGAFDYW

SEQ ID NO: 2333 - protein, 13 aa, synthetic construct
  REGION 1..13: note = Non-Selective Anti-FLT3 HCDR3
CARDRLRSRFDYW

SEQ ID NO: 2334 - protein, 15 aa, synthetic construct
  REGION 1..15: note = Non-Selective Anti-FLT3 HCDR3
CAREDYYDSSGYYNW

SEQ ID NO: 2335 - protein, 14 aa, synthetic construct
  REGION 1..14: note = Non-Selective Anti-FLT3 HCDR3
CVVERRREVGMDVW

SEQ ID NO: 2336 - protein, 18 aa, synthetic construct
  REGION 1..18: note = Non-Selective Anti-FLT3 HCDR3
CARDQGYYYDSSGAFDIW

SEQ ID NO: 2337 - protein, 14 aa, synthetic construct
  REGION 1..14: note = Non-Selective Anti-FLT3 HCDR3
CARGIGSKGAFDIW

SEQ ID NO: 2338 - protein, 13 aa, synthetic construct
  REGION 1..13: note = Non-Selective Anti-FLT3 HCDR3
CARQGGLRDFDYW

SEQ ID NO: 2339 - protein, 24 aa, synthetic construct
  REGION 1..24: note = Non-Selective Anti-FLT3 HCDR3
CANDRHYDFWSGYYKEEWEYFQHW

SEQ ID NO: 2340 - protein, 13 aa, synthetic construct
  REGION 1..13: note = Non-Selective Anti-FLT3 HCDR3
CAKAIDYYYMDVW

SEQ ID NO: 2341 - protein, 11 aa, synthetic construct
  REGION 1..11: note = Non-Selective Anti-FLT3 LCDR1
RASHNIGNKLA

SEQ ID NO: 2342 - protein, 11 aa, synthetic construct
  REGION 1..11: note = Non-Selective Anti-FLT3 LCDR1
RASQSIRSWLA

SEQ ID NO: 2343 - protein, 17 aa, synthetic construct
  REGION 1..17: note = Non-Selective Anti-FLT3 LCDR1
KSSQSVLYSSNNKNYLA

SEQ ID NO: 2344 - protein, 11 aa, synthetic construct
  REGION 1..11: note = Non-Selective Anti-FLT3 LCDR1
RASQSIGSNLD

SEQ ID NO: 2345 - protein, 16 aa, synthetic construct
  REGION 1..16: note = Non-Selective Anti-FLT3 LCDR1
RSSQSLLHSNGYNYLD

SEQ ID NO: 2346 - protein, 11 aa, synthetic construct
  REGION 1..11: note = Non-Selective Anti-FLT3 LCDR1
RASQAISSYLA

SEQ ID NO: 2347 - protein, 11 aa, synthetic construct
  REGION 1..11: note = Non-Selective Anti-FLT3 LCDR1
QASHDISKYLN

SEQ ID NO: 2348 - protein, 12 aa, synthetic construct
  REGION 1..12: note = Non-Selective Anti-FLT3 LCDR1
RASQSLSNIYLA

SEQ ID NO: 2349 - protein, 11 aa, synthetic construct
  REGION 1..11: note = Non-Selective Anti-FLT3 LCDR1
RASQSISTWLA

SEQ ID NO: 2350 - protein, 17 aa, synthetic construct
  REGION 1..17: note = Non-Selective Anti-FLT3 LCDR1
KSSQSVFYSSNNKNYLA

SEQ ID NO: 2351 - protein, 11 aa, synthetic construct
  REGION 1..11: note = Non-Selective Anti-FLT3 LCDR1
RASQGISNNLA

SEQ ID NO: 2352 - protein, 12 aa, synthetic construct
  REGION 1..12: note = Non-Selective Anti-FLT3 LCDR1
RASQSVSSSQLA

SEQ ID NO: 2353 - protein, 11 aa, synthetic construct
  REGION 1..11: note = Non-Selective Anti-FLT3 LCDR1
RASQSISSYLN

SEQ ID NO: 2354 - protein, 11 aa, synthetic construct
  REGION 1..11: note = Non-Selective Anti-FLT3 LCDR1
RASQGIRNHLA

SEQ ID NO: 2355 - protein, 11 aa, synthetic construct
  REGION 1..11: note = Non-Selective Anti-FLT3 LCDR1
RASQGISSYLA

SEQ ID NO: 2356 - protein, 16 aa, synthetic construct
  REGION 1..16: note = Non-Selective Anti-FLT3 LCDR1
RSSQSLLHSNGYNYLD

SEQ ID NO: 2357 - protein, 17 aa, synthetic construct
  REGION 1..17: note = Non-Selective Anti-FLT3 LCDR1
KSSQSVLYSVNNKNYLA

SEQ ID NO: 2358 - protein, 11 aa, synthetic construct
  REGION 1..11: note = Non-Selective Anti-FLT3 LCDR1
RASQSISTWLA

SEQ ID NO: 2359 - protein, 11 aa, synthetic construct
  REGION 1..11: note = Non-Selective Anti-FLT3 LCDR1
RASQGIRSELS

SEQ ID NO: 2360 - protein, 11 aa, synthetic construct
  REGION 1..11: note = Non-Selective Anti-FLT3 LCDR1
RASQGIRNDLG

SEQ ID NO: 2361 - protein, 16 aa, synthetic construct
  REGION 1..16: note = Non-Selective Anti-FLT3 LCDR1
RSSQSLLHSNGYNYLD

SEQ ID NO: 2362 - protein, 11 aa, synthetic construct
  REGION 1..11: note = Non-Selective Anti-FLT3 LCDR1
RASQDISNYLA

SEQ ID NO: 2363 - protein, 11 aa, synthetic construct
  REGION 1..11: note = Non-Selective Anti-FLT3 LCDR1
RASQGISNYLA

SEQ ID NO: 2364 - protein, 12 aa, synthetic construct
  REGION 1..12: note = Non-Selective Anti-FLT3 LCDR1
RASQSVSSDFLA

SEQ ID NO: 2365 - protein, 15 aa, synthetic construct
  REGION 1..15: note = Non-Selective Anti-FLT3 LCDR1
KSSQSLLYGSKNYIS

SEQ ID NO: 2366 - protein, 11 aa, synthetic construct
  REGION 1..11: note = Non-Selective Anti-FLT3 LCDR1
RASQGISNYLA

SEQ ID NO: 2367 - protein, 11 aa, synthetic construct
  REGION 1..11: note = Non-Selective Anti-FLT3 LCDR1
RASQSVSSYLN

SEQ ID NO: 2368 - protein, 11 aa, synthetic construct
  REGION 1..11: note = Non-Selective Anti-FLT3 LCDR1
RASQSIYTHLN

SEQ ID NO: 2369 - protein, 11 aa, synthetic construct
  REGION 1..11: note = Non-Selective Anti-FLT3 LCDR1
RASQGISNSLA

SEQ ID NO: 2370 - protein, 12 aa, synthetic construct
  REGION 1..12: note = Non-Selective Anti-FLT3 LCDR1
RASQSVSADYIA

SEQ ID NO: 2371 - protein, 11 aa, synthetic construct
  REGION 1..11: note = Non-Selective Anti-FLT3 LCDR1
RASQSISTYLN

SEQ ID NO: 2372 - protein, 11 aa, synthetic construct
  REGION 1..11: note = Non-Selective Anti-FLT3 LCDR1
RASQNIANSLN

SEQ ID NO: 2373 - protein, 16 aa, synthetic construct
  REGION 1..16: note = Non-Selective Anti-FLT3 LCDR1
RSSQSLLHSNGYNYLD

SEQ ID NO: 2374 - protein, 17 aa, synthetic construct
  REGION 1..17: note = Non-Selective Anti-FLT3 LCDR1
KSSQSVLYSSNNKNYLA

SEQ ID NO: 2375 - protein, 11 aa, synthetic construct
  REGION 1..11: note = Non-Selective Anti-FLT3 LCDR1
RASQSVSSNLA

SEQ ID NO: 2376 - protein, 11 aa, synthetic construct
  REGION 1..11: note = Non-Selective Anti-FLT3 LCDR1
RASQSVSSNLA

SEQ ID NO: 2377 - protein, 16 aa, synthetic construct
  REGION 1..16: note = Non-Selective Anti-FLT3 LCDR1
RSSQSLLHSNGYNYLD

SEQ ID NO: 2378 - protein, 16 aa, synthetic construct
  REGION 1..16: note = Non-Selective Anti-FLT3 LCDR1
RSSQSLLHSNGYNYLD

SEQ ID NO: 2379 - protein, 12 aa, synthetic construct
  REGION 1..12: note = Non-Selective Anti-FLT3 LCDR1
RASQSVGSSYLA

SEQ ID NO: 2380 - protein, 11 aa, synthetic construct
  REGION 1..11: note = Non-Selective Anti-FLT3 LCDR1
RASQSISSYLN

SEQ ID NO: 2381 - protein, 11 aa, synthetic construct
  REGION 1..11: note = Non-Selective Anti-FLT3 LCDR1
RASQSISNYLA

SEQ ID NO: 2382 - protein, 11 aa, synthetic construct
  REGION 1..11: note = Non-Selective Anti-FLT3 LCDR1
RASESVSSALA

SEQ ID NO: 2383 - protein, 12 aa, synthetic construct
  REGION 1..12: note = Non-Selective Anti-FLT3 LCDR1
RASQTLTGGLLA

SEQ ID NO: 2384 - protein, 11 aa, synthetic construct
  REGION 1..11: note = Non-Selective Anti-FLT3 LCDR1
RASQDIRNDLG

SEQ ID NO: 2385 - protein, 12 aa, synthetic construct
  REGION 1..12: note = Non-Selective Anti-FLT3 LCDR1
RASQSVSSSYLA

SEQ ID NO: 2386 - protein, 11 aa, synthetic construct
  REGION 1..11: note = Non-Selective Anti-FLT3 LCDR1
QATQDISNYLN

SEQ ID NO: 2387 - protein, 12 aa, synthetic construct
  REGION 1..12: note = Non-Selective Anti-FLT3 LCDR1
RGSQSISGNYLA

SEQ ID NO: 2388 - protein, 11 aa, synthetic construct
  REGION 1..11: note = Non-Selective Anti-FLT3 LCDR1
RASQDLDRYLA

SEQ ID NO: 2389 - protein, 12 aa, synthetic construct
  REGION 1..12: note = Non-Selective Anti-FLT3 LCDR1
RASQSIGNNLKA

SEQ ID NO: 2390 - protein, 12 aa, synthetic construct
  REGION 1..12: note = Non-Selective Anti-FLT3 LCDR1
RASQSVGSSSLA

SEQ ID NO: 2391 - protein, 12 aa, synthetic construct
  REGION 1..12: note = Non-Selective Anti-FLT3 LCDR1
RASQSVSSNYLA

SEQ ID NO: 2392 - protein, 11 aa, synthetic construct
  REGION 1..11: note = Non-Selective Anti-FLT3 LCDR1
RASQSISSYLN

SEQ ID NO: 2393 - protein, 11 aa, synthetic construct
  REGION 1..11: note = Non-Selective Anti-FLT3 LCDR1
RASQDISRWLA

SEQ ID NO: 2394 - protein, 12 aa, synthetic construct
  REGION 1..12: note = Non-Selective Anti-FLT3 LCDR1
RASQSVSSSSLA

SEQ ID NO: 2395 - protein, 11 aa, synthetic construct
  REGION 1..11: note = Non-Selective Anti-FLT3 LCDR1
QASHDIRNSVN

SEQ ID NO: 2396 - protein, 11 aa, synthetic construct
  REGION 1..11: note = Non-Selective Anti-FLT3 LCDR1
RASHDINNYLN

SEQ ID NO: 2397 - protein, 11 aa, synthetic construct
  REGION 1..11: note = Non-Selective Anti-FLT3 LCDR1
RASQSISSWLA

SEQ ID NO: 2398 - protein, 11 aa, synthetic construct
  REGION 1..11: note = Non-Selective Anti-FLT3 LCDR1
RASQSIKGALA

SEQ ID NO: 2399 - protein, 17 aa, synthetic construct
  REGION 1..17: note = Non-Selective Anti-FLT3 LCDR1
KSSQSLFYSSNNRNYLA

SEQ ID NO: 2400 - protein, 11 aa, synthetic construct
  REGION 1..11: note = Non-Selective Anti-FLT3 LCDR1
RSSQSISTYLN

SEQ ID NO: 2401 - protein, 17 aa, synthetic construct
  REGION 1..17: note = Non-Selective Anti-FLT3 LCDR1
KSSQSISHSPNTRDYLA

SEQ ID NO: 2402 - protein, 12 aa, synthetic construct
  REGION 1..12: note = Non-Selective Anti-FLT3 LCDR1
RASQRVGNTYLA

SEQ ID NO: 2403 - protein, 12 aa, synthetic construct
  REGION 1..12: note = Non-Selective Anti-FLT3 LCDR1
RASQSVSSSYLA

SEQ ID NO: 2404 - protein, 11 aa, synthetic construct
  REGION 1..11: note = Non-Selective Anti-FLT3 LCDR1
RASQDISNYLA

SEQ ID NO: 2405 - protein, 12 aa, synthetic construct
  REGION 1..12: note = Non-Selective Anti-FLT3 LCDR1
RASQSVNSEHLA

SEQ ID NO: 2406 - protein, 11 aa, synthetic construct
  REGION 1..11: note = Non-Selective Anti-FLT3 LCDR1
RASQSVGSQLG

SEQ ID NO: 2407 - protein, 11 aa, synthetic construct
  REGION 1..11: note = Non-Selective Anti-FLT3 LCDR1
RASQDISNFVA

SEQ ID NO: 2408 - protein, 12 aa, synthetic construct
  REGION 1..12: note = Non-Selective Anti-FLT3 LCDR1
RASQSVNNNQLA

SEQ ID NO: 2409 - protein, 12 aa, synthetic construct
  REGION 1..12: note = Non-Selective Anti-FLT3 LCDR1
RASQSISSSYLA

SEQ ID NO: 2410 - protein, 11 aa, synthetic construct
  REGION 1..11: note = Non-Selective Anti-FLT3 LCDR1
RASQSISSYLN

SEQ ID NO: 2411 - protein, 12 aa, synthetic construct
  REGION 1..12: note = Non-Selective Anti-FLT3 LCDR1
RASQSVSYNQLA

SEQ ID NO: 2412 - protein, 11 aa, synthetic construct
  REGION 1..11: note = Non-Selective Anti-FLT3 LCDR1
QASQYISNYLN

SEQ ID NO: 2413 - protein, 12 aa, synthetic construct
  REGION 1..12: note = Non-Selective Anti-FLT3 LCDR1
RASQSVSSSSLA

SEQ ID NO: 2414 - protein, 17 aa, synthetic construct
  REGION 1..17: note = Non-Selective Anti-FLT3 LCDR1
KSSQSVLYSSNNKNYLA

SEQ ID NO: 2415 - protein, 11 aa, synthetic construct
  REGION 1..11: note = Non-Selective Anti-FLT3 LCDR1
RASQSISSYLN

SEQ ID NO: 2416 - protein, 11 aa, synthetic construct
  REGION 1..11: note = Non-Selective Anti-FLT3 LCDR1
RASQSVSSYLA

SEQ ID NO: 2417 - protein, 11 aa, synthetic construct
  REGION 1..11: note = Non-Selective Anti-FLT3 LCDR1
RASQSVDNLVG

SEQ ID NO: 2418 - protein, 17 aa, synthetic construct
  REGION 1..17: note = Non-Selective Anti-FLT3 LCDR1
KSSQSVLYSSNNENYLA

SEQ ID NO: 2419 - protein, 11 aa, synthetic construct
  REGION 1..11: note = Non-Selective Anti-FLT3 LCDR1
RASQSISSSLN

SEQ ID NO: 2420 - protein, 11 aa, synthetic construct
  REGION 1..11: note = Non-Selective Anti-FLT3 LCDR1
QASQDISNYLN

SEQ ID NO: 2421 - protein, 12 aa, synthetic construct
  REGION 1..12: note = Non-Selective Anti-FLT3 LCDR1
RASQSVSSSYLA

SEQ ID NO: 2422 - protein, 11 aa, synthetic construct
  REGION 1..11: note = Non-Selective Anti-FLT3 LCDR1
RASRSISDYLA

SEQ ID NO: 2423 - protein, 11 aa, synthetic construct
  REGION 1..11: note = Non-Selective Anti-FLT3 LCDR1
RASQSISSYLN

SEQ ID NO: 2424 - protein, 11 aa, synthetic construct
  REGION 1..11: note = Non-Selective Anti-FLT3 LCDR1
RASHNISTWLA

SEQ ID NO: 2425 - protein, 17 aa, synthetic construct
  REGION 1..17: note = Non-Selective Anti-FLT3 LCDR1
KSSQSVLYSSNNKNYLA

SEQ ID NO: 2426 - protein, 12 aa, synthetic construct
  REGION 1..12: note = Non-Selective Anti-FLT3 LCDR1
RASQSVSSSYLA

SEQ ID NO: 2427 - protein, 11 aa, synthetic construct
  REGION 1..11: note = Non-Selective Anti-FLT3 LCDR1
RASQSISSSLA

SEQ ID NO: 2428 - protein, 11 aa, synthetic construct
  REGION 1..11: note = Non-Selective Anti-FLT3 LCDR1
RASQGISNNLN

SEQ ID NO: 2429 - protein, 11 aa, synthetic construct
  REGION 1..11: note = Non-Selective Anti-FLT3 LCDR1
QASQGITSYLN

SEQ ID NO: 2430 - protein, 11 aa, synthetic construct
  REGION 1..11: note = Non-Selective Anti-FLT3 LCDR1
RASQSISSYLN

SEQ ID NO: 2431 - protein, 16 aa, synthetic construct
  REGION 1..16: note = Non-Selective Anti-FLT3 LCDR1
RSSQSLLHSNGYNYLD

SEQ ID NO: 2432 - protein, 11 aa, synthetic construct
  REGION 1..11: note = Non-Selective Anti-FLT3 LCDR1
RASQSISTYVN

SEQ ID NO: 2433 - protein, 16 aa, synthetic construct
  REGION 1..16: note = Non-Selective Anti-FLT3 LCDR1
RSSQSLLHSNGYNYLD

SEQ ID NO: 2434 - protein, 11 aa, synthetic construct
  REGION 1..11: note = Non-Selective Anti-FLT3 LCDR1
RASQGIRNDLG

SEQ ID NO: 2435 - protein, 7 aa, synthetic construct
  REGION 1..7: note = Non-Selective Anti-FLT3 LCDR2
GATTLQS

SEQ ID NO: 2436 - protein, 7 aa, synthetic construct
  REGION 1..7: note = Non-Selective Anti-FLT3 LCDR2
DASNLET

SEQ ID NO: 2437 - protein, 7 aa, synthetic construct
  REGION 1..7: note = Non-Selective Anti-FLT3 LCDR2
WASTRAS

SEQ ID NO: 2438 - protein, 7 aa, synthetic construct
  REGION 1..7: note = Non-Selective Anti-FLT3 LCDR2
DASSLQS

SEQ ID NO: 2439 - protein, 7 aa, synthetic construct
  REGION 1..7: note = Non-Selective Anti-FLT3 LCDR2
AASSLQS

SEQ ID NO: 2440 - protein, 7 aa, synthetic construct
  REGION 1..7: note = Non-Selective Anti-FLT3 LCDR2
AASNLQG

SEQ ID NO: 2441 - protein, 7 aa, synthetic construct
  REGION 1..7: note = Non-Selective Anti-FLT3 LCDR2
AASILQS

SEQ ID NO: 2442 - protein, 7 aa, synthetic construct
  REGION 1..7: note = Non-Selective Anti-FLT3 LCDR2
DVSSRAA

SEQ ID NO: 2443 - protein, 7 aa, synthetic construct
  REGION 1..7: note = Non-Selective Anti-FLT3 LCDR2
DASKLET

SEQ ID NO: 2444 - protein, 7 aa, synthetic construct
  REGION 1..7: note = Non-Selective Anti-FLT3 LCDR2
WASTRAS

SEQ ID NO: 2445 - protein, 7 aa, synthetic construct
  REGION 1..7: note = Non-Selective Anti-FLT3 LCDR2
AASTLHN

SEQ ID NO: 2446 - protein, 7 aa, synthetic construct
  REGION 1..7: note = Non-Selective Anti-FLT3 LCDR2
DTSTRAT

SEQ ID NO: 2447 - protein, 7 aa, synthetic construct
  REGION 1..7: note = Non-Selective Anti-FLT3 LCDR2
DASNLKT

SEQ ID NO: 2448 - protein, 7 aa, synthetic construct
  REGION 1..7: note = Non-Selective Anti-FLT3 LCDR2
AASSLQS

SEQ ID NO: 2449 - protein, 7 aa, synthetic construct
  REGION 1..7: note = Non-Selective Anti-FLT3 LCDR2
AASTLQS

SEQ ID NO: 2450 - protein, 7 aa, synthetic construct
  REGION 1..7: note = Non-Selective Anti-FLT3 LCDR2
LGSNRAS

SEQ ID NO: 2451 - protein, 7 aa, synthetic construct
  REGION 1..7: note = Non-Selective Anti-FLT3 LCDR2
WASTRES

SEQ ID NO: 2452 - protein, 7 aa, synthetic construct
  REGION 1..7: note = Non-Selective Anti-FLT3 LCDR2
AASSLQS

SEQ ID NO: 2453 - protein, 7 aa, synthetic construct
  REGION 1..7: note = Non-Selective Anti-FLT3 LCDR2
KASSLES

SEQ ID NO: 2454 - protein, 7 aa, synthetic construct
  REGION 1..7: note = Non-Selective Anti-FLT3 LCDR2
AASSLQS

SEQ ID NO: 2455 - protein, 7 aa, synthetic construct
  REGION 1..7: note = Non-Selective Anti-FLT3 LCDR2
GASYLQS

SEQ ID NO: 2456 - protein, 7 aa, synthetic construct
  REGION 1..7: note = Non-Selective Anti-FLT3 LCDR2
AASTLQS

SEQ ID NO: 2457 - protein, 7 aa, synthetic construct
  REGION 1..7: note = Non-Selective Anti-FLT3 LCDR2
DGSNLET

SEQ ID NO: 2458 - protein, 7 aa, synthetic construct
  REGION 1..7: note = Non-Selective Anti-FLT3 LCDR2
DTSSRAS

SEQ ID NO: 2459 - protein, 7 aa, synthetic construct
  REGION 1..7: note = Non-Selective Anti-FLT3 LCDR2
SSSTRES

SEQ ID NO: 2460 - protein, 7 aa, synthetic construct
  REGION 1..7: note = Non-Selective Anti-FLT3 LCDR2
GASNLQS

SEQ ID NO: 2461 - protein, 7 aa, synthetic construct
  REGION 1..7: note = Non-Selective Anti-FLT3 LCDR2
GASNLQS

SEQ ID NO: 2462 - protein, 7 aa, synthetic construct
  REGION 1..7: note = Non-Selective Anti-FLT3 LCDR2
AASRLQT

SEQ ID NO: 2463 - protein, 7 aa, synthetic construct
  REGION 1..7: note = Non-Selective Anti-FLT3 LCDR2
AASSLQS

SEQ ID NO: 2464 - protein, 7 aa, synthetic construct
  REGION 1..7: note = Non-Selective Anti-FLT3 LCDR2
DVSTRAS

SEQ ID NO: 2465 - protein, 7 aa, synthetic construct
  REGION 1..7: note = Non-Selective Anti-FLT3 LCDR2
AASNLQS

SEQ ID NO: 2466 - protein, 7 aa, synthetic construct
  REGION 1..7: note = Non-Selective Anti-FLT3 LCDR2
AASSLQS

SEQ ID NO: 2467 - protein, 7 aa, synthetic construct
  REGION 1..7: note = Non-Selective Anti-FLT3 LCDR2
AASSLQS

SEQ ID NO: 2468 - protein, 7 aa, synthetic construct
  REGION 1..7: note = Non-Selective Anti-FLT3 LCDR2
WASIRES

SEQ ID NO: 2469 - protein, 7 aa, synthetic construct
  REGION 1..7: note = Non-Selective Anti-FLT3 LCDR2
GASTRAT

SEQ ID NO: 2470 - protein, 7 aa, synthetic construct
  REGION 1..7: note = Non-Selective Anti-FLT3 LCDR2
DVSSRAT

SEQ ID NO: 2471 - protein, 7 aa, synthetic construct
  REGION 1..7: note = Non-Selective Anti-FLT3 LCDR2
AASTLQS

SEQ ID NO: 2472 - protein, 7 aa, synthetic construct
  REGION 1..7: note = Non-Selective Anti-FLT3 LCDR2
LGSNRAS

SEQ ID NO: 2473 - protein, 7 aa, synthetic construct
  REGION 1..7: note = Non-Selective Anti-FLT3 LCDR2
DVSTRAA

SEQ ID NO: 2474 - protein, 7 aa, synthetic construct
  REGION 1..7: note = Non-Selective Anti-FLT3 LCDR2
AASSLQS

SEQ ID NO: 2475 - protein, 7 aa, synthetic construct
  REGION 1..7: note = Non-Selective Anti-FLT3 LCDR2
AASSLQG

SEQ ID NO: 2476 - protein, 7 aa, synthetic construct
  REGION 1..7: note = Non-Selective Anti-FLT3 LCDR2
GASTRAT

SEQ ID NO: 2477 - protein, 7 aa, synthetic construct
  REGION 1..7: note = Non-Selective Anti-FLT3 LCDR2
DTSSRAA

SEQ ID NO: 2478 - protein, 7 aa, synthetic construct
  REGION 1..7: note = Non-Selective Anti-FLT3 LCDR2
AASSLQS

SEQ ID NO: 2479 - protein, 7 aa, synthetic construct
  REGION 1..7: note = Non-Selective Anti-FLT3 LCDR2
GASTRAT

SEQ ID NO: 2480 - protein, 7 aa, synthetic construct
  REGION 1..7: note = Non-Selective Anti-FLT3 LCDR2
GASNLPS

SEQ ID NO: 2481 - protein, 7 aa, synthetic construct
  REGION 1..7: note = Non-Selective Anti-FLT3 LCDR2
DTSARAA

SEQ ID NO: 2482 - protein, 7 aa, synthetic construct
  REGION 1..7: note = Non-Selective Anti-FLT3 LCDR2
AASSLQT

SEQ ID NO: 2483 - protein, 7 aa, synthetic construct
  REGION 1..7: note = Non-Selective Anti-FLT3 LCDR2
DTSAHTT

SEQ ID NO: 2484 - protein, 7 aa, synthetic construct
  REGION 1..7: note = Non-Selective Anti-FLT3 LCDR2
GASTRAT

SEQ ID NO: 2485 - protein, 7 aa, synthetic construct
  REGION 1..7: note = Non-Selective Anti-FLT3 LCDR2
DVSTRAT

SEQ ID NO: 2486 - protein, 7 aa, synthetic construct
  REGION 1..7: note = Non-Selective Anti-FLT3 LCDR2
AASSLQS

SEQ ID NO: 2487 - protein, 7 aa, synthetic construct
  REGION 1..7: note = Non-Selective Anti-FLT3 LCDR2
AASSLQS

SEQ ID NO: 2488 - protein, 7 aa, synthetic construct
  REGION 1..7: note = Non-Selective Anti-FLT3 LCDR2
DTSTRAT

SEQ ID NO: 2489 - protein, 7 aa, synthetic construct
  REGION 1..7: note = Non-Selective Anti-FLT3 LCDR2
ATSSLQS

SEQ ID NO: 2490 - protein, 7 aa, synthetic construct
  REGION 1..7: note = Non-Selective Anti-FLT3 LCDR2
DASNLET

SEQ ID NO: 2491 - protein, 7 aa, synthetic construct
  REGION 1..7: note = Non-Selective Anti-FLT3 LCDR2
AASTLQS

SEQ ID NO: 2492 - protein, 7 aa, synthetic construct
  REGION 1..7: note = Non-Selective Anti-FLT3 LCDR2
SASNLQS

SEQ ID NO: 2493 - protein, 7 aa, synthetic construct
  REGION 1..7: note = Non-Selective Anti-FLT3 LCDR2
WASTRES

SEQ ID NO: 2494 - protein, 7 aa, synthetic construct
  REGION 1..7: note = Non-Selective Anti-FLT3 LCDR2
GASNLQS

SEQ ID NO: 2495 - protein, 7 aa, synthetic construct
  REGION 1..7: note = Non-Selective Anti-FLT3 LCDR2
WASTRES

SEQ ID NO: 2496 - protein, 7 aa, synthetic construct
  REGION 1..7: note = Non-Selective Anti-FLT3 LCDR2
DVSARAS

SEQ ID NO: 2497 - protein, 7 aa, synthetic construct
  REGION 1..7: note = Non-Selective Anti-FLT3 LCDR2
DVSTRAT

SEQ ID NO: 2498 - protein, 7 aa, synthetic construct
  REGION 1..7: note = Non-Selective Anti-FLT3 LCDR2
AASSLQS

SEQ ID NO: 2499 - protein, 7 aa, synthetic construct
  REGION 1..7: note = Non-Selective Anti-FLT3 LCDR2
DTSSRAT

SEQ ID NO: 2500 - protein, 7 aa, synthetic construct
  REGION 1..7: note = Non-Selective Anti-FLT3 LCDR2
GASTRAT

SEQ ID NO: 2501 - protein, 7 aa, synthetic construct
  REGION 1..7: note = Non-Selective Anti-FLT3 LCDR2
AASSLQS

SEQ ID NO: 2502 - protein, 7 aa, synthetic construct
  REGION 1..7: note = Non-Selective Anti-FLT3 LCDR2
DTSSRAT

SEQ ID NO: 2503 - protein, 7 aa, synthetic construct
  REGION 1..7: note = Non-Selective Anti-FLT3 LCDR2
DVSARAT

SEQ ID NO: 2504 - protein, 7 aa, synthetic construct
  REGION 1..7: note = Non-Selective Anti-FLT3 LCDR2
DASNLET

SEQ ID NO: 2505 - protein, 7 aa, synthetic construct
  REGION 1..7: note = Non-Selective Anti-FLT3 LCDR2
DISSRAA

SEQ ID NO: 2506 - protein, 7 aa, synthetic construct
  REGION 1..7: note = Non-Selective Anti-FLT3 LCDR2
DASSLES

SEQ ID NO: 2507 - protein, 7 aa, synthetic construct
  REGION 1..7: note = Non-Selective Anti-FLT3 LCDR2
DASTRAS

SEQ ID NO: 2508 - protein, 7 aa, synthetic construct
  REGION 1..7: note = Non-Selective Anti-FLT3 LCDR2
WASTRES

SEQ ID NO: 2509 - protein, 7 aa, synthetic construct
  REGION 1..7: note = Non-Selective Anti-FLT3 LCDR2
AASSLQS

SEQ ID NO: 2510 - protein, 7 aa, synthetic construct
  REGION 1..7: note = Non-Selective Anti-FLT3 LCDR2
DTSTRAT

SEQ ID NO: 2511 - protein, 7 aa, synthetic construct
  REGION 1..7: note = Non-Selective Anti-FLT3 LCDR2
DISSRAT

SEQ ID NO: 2512 - protein, 7 aa, synthetic construct
  REGION 1..7: note = Non-Selective Anti-FLT3 LCDR2
WASTRES

SEQ ID NO: 2513 - protein, 7 aa, synthetic construct
  REGION 1..7: note = Non-Selective Anti-FLT3 LCDR2
KASSLES

SEQ ID NO: 2514 - protein, 7 aa, synthetic construct
  REGION 1..7: note = Non-Selective Anti-FLT3 LCDR2
QASNKDT

SEQ ID NO: 2515 - protein, 7 aa, synthetic construct
  REGION 1..7: note = Non-Selective Anti-FLT3 LCDR2
DASARAA

SEQ ID NO: 2516 - protein, 7 aa, synthetic construct
  REGION 1..7: note = Non-Selective Anti-FLT3 LCDR2
DASSRAT

SEQ ID NO: 2517 - protein, 7 aa, synthetic construct
  REGION 1..7: note = Non-Selective Anti-FLT3 LCDR2
AASSLQS

SEQ ID NO: 2518 - protein, 7 aa, synthetic construct
  REGION 1..7: note = Non-Selective Anti-FLT3 LCDR2
AASSLQS

SEQ ID NO: 2519 - protein, 7 aa, synthetic construct
  REGION 1..7: note = Non-Selective Anti-FLT3 LCDR2
WASTRES

SEQ ID NO: 2520 - protein, 7 aa, synthetic construct
  REGION 1..7: note = Non-Selective Anti-FLT3 LCDR2
DVSTRAS

SEQ ID NO: 2521 - protein, 7 aa, synthetic construct
  REGION 1..7: note = Non-Selective Anti-FLT3 LCDR2
AASSLQS

SEQ ID NO: 2522 - protein, 7 aa, synthetic construct
  REGION 1..7: note = Non-Selective Anti-FLT3 LCDR2
KASTLES

SEQ ID NO: 2523 - protein, 7 aa, synthetic construct
  REGION 1..7: note = Non-Selective Anti-FLT3 LCDR2
KASSLES

SEQ ID NO: 2524 - protein, 7 aa, synthetic construct
  REGION 1..7: note = Non-Selective Anti-FLT3 LCDR2
DASNLET

SEQ ID NO: 2525 - protein, 7 aa, synthetic construct
  REGION 1..7: note = Non-Selective Anti-FLT3 LCDR2
LGSNRAS

SEQ ID NO: 2526 - protein, 7 aa, synthetic construct
  REGION 1..7: note = Non-Selective Anti-FLT3 LCDR2
DTSSLQS

SEQ ID NO: 2527 - protein, 7 aa, synthetic construct
  REGION 1..7: note = Non-Selective Anti-FLT3 LCDR2
LGSNRAS

SEQ ID NO: 2528 - protein, 7 aa, synthetic construct
  REGION 1..7: note = Non-Selective Anti-FLT3 LCDR2
QASSLEN

SEQ ID NO: 2529 - protein, 11 aa, synthetic construct [sequence omitted]

SEQ ID NO: 2530 - protein, 11 aa, synthetic construct [sequence omitted]

SEQ ID NO: 2531 - protein, 11 aa, synthetic construct [sequence omitted]

SEQ ID NO: 2532 - protein, 11 aa, synthetic construct [sequence omitted]

SEQ ID NO: 2533 - protein, 11 aa, synthetic construct [sequence omitted]

SEQ ID NO: 2534 - protein, 11 aa, synthetic construct [sequence omitted]

SEQ ID NO: 2535 - protein, 11 aa, synthetic construct [sequence omitted]

SEQ ID NO: 2536 - protein, 11 aa, synthetic construct [sequence omitted]

SEQ ID NO: 2537 - protein, 11 aa, synthetic construct [sequence omitted]

SEQ ID NO: 2538 - protein, 11 aa, synthetic construct
  REGION 1..11: note = Non-Selective Anti-FLT3 LCDR3
CHQYYSKPPTF

SEQ ID NO: 2539 - protein, 11 aa, synthetic construct [sequence omitted]

SEQ ID NO: 2540 - protein, 11 aa, synthetic construct [sequence omitted]

SEQ ID NO: 2541 - protein, 11 aa, synthetic construct [sequence omitted]

SEQ ID NO: 2542 - protein, 10 aa, synthetic construct [sequence omitted]

SEQ ID NO: 2543 - protein, 11 aa, synthetic construct [sequence omitted]

SEQ ID NO: 2544 - protein, 11 aa, synthetic construct [sequence omitted]

SEQ ID NO: 2545 - protein, 11 aa, synthetic construct [sequence omitted]

SEQ ID NO: 2546 - protein, 11 aa, synthetic construct [sequence omitted]

SEQ ID NO: 2547 - protein, 11 aa, synthetic construct [sequence omitted]

SEQ ID NO: 2548 - protein, 11 aa, synthetic construct [sequence omitted]

SEQ ID NO: 2549 - protein, 11 aa, synthetic construct
  REGION 1..11: note = Non-Selective Anti-FLT3 LCDR3
CMQALQGPITF

SEQ ID NO: 2550 - protein, 11 aa, synthetic construct [sequence omitted]

SEQ ID NO: 2551 - protein, 11 aa, synthetic construct [sequence omitted]

SEQ ID NO: 2552 - protein, 10 aa, synthetic construct
  REGION 1..10: note = Non-Selective Anti-FLT3 LCDR3
CQQYAGPPTF

SEQ ID NO: 2553 - protein, 11 aa, synthetic construct [sequence omitted]

SEQ ID NO: 2554 - protein, 11 aa, synthetic construct [sequence omitted]

SEQ ID NO: 2555 - protein, 11 aa, synthetic construct [sequence omitted]

SEQ ID NO: 2556 - protein, 11 aa, synthetic construct [sequence omitted]

SEQ ID NO: 2557 - protein, 11 aa, synthetic construct [sequence omitted]

SEQ ID NO: 2558 - protein, 11 aa, synthetic construct [sequence omitted]

SEQ ID NO: 2559 - protein, 11 aa, synthetic construct [sequence omitted]

SEQ ID NO: 2560 - protein, 11 aa, synthetic construct [sequence omitted]

SEQ ID NO: 2561 - protein, 11 aa, synthetic construct
  REGION 1..11: note = Non-Selective Anti-FLT3 LCDR3
CMQGLRTPHTF

SEQ ID NO: 2562 - protein, 11 aa, synthetic construct [sequence omitted]

SEQ ID NO: 2563 - protein, 11 aa, synthetic construct [sequence omitted]

SEQ ID NO: 2564 - protein, 11 aa, synthetic construct
  REGION 1..11: note = Non-Selective Anti-FLT3 LCDR3
CQQLDAYPLTF

SEQ ID NO: 2565 - protein, 11 aa, synthetic construct [sequence omitted]

SEQ ID NO: 2566 - protein, 11 aa, synthetic construct [sequence omitted]

SEQ ID NO: 2567 - protein, 11 aa, synthetic construct [sequence omitted]

SEQ ID NO: 2568 - protein, 11 aa, synthetic construct [sequence omitted]

SEQ ID NO: 2569 - protein, 11 aa, synthetic construct [sequence omitted]

SEQ ID NO: 2570 - protein, 10 aa, synthetic construct [sequence omitted]

SEQ ID NO: 2571 - protein, 11 aa, synthetic construct [sequence omitted]

SEQ ID NO: 2572 - protein, 11 aa, synthetic construct [sequence omitted]

SEQ ID NO: 2573 - protein, 11 aa, synthetic construct [sequence omitted]

SEQ ID NO: 2574 - protein, 11 aa, synthetic construct
  REGION 1..11: note = Non-Selective Anti-FLT3 LCDR3
CQQSYSDLLTF

SEQ ID NO: 2575 - protein, 11 aa, synthetic construct [sequence omitted]

SEQ ID NO: 2576 - protein, 11 aa, synthetic construct [sequence omitted]

SEQ ID NO: 2577 - protein, 10 aa, synthetic construct
  REGION 1..10: note = Non-Selective Anti-FLT3 LCDR3
CQHYGNSLTF

SEQ ID NO: 2578 - protein, 11 aa, synthetic construct [sequence omitted]

SEQ ID NO: 2579 - protein, 11 aa, synthetic construct [sequence omitted]

SEQ ID NO: 2580 - protein, 11 aa, synthetic construct [sequence omitted]

SEQ ID NO: 2581 - protein, 11 aa, synthetic construct [sequence omitted]

SEQ ID NO: 2582 - protein, 11 aa, synthetic construct [sequence omitted]

SEQ ID NO: 2583 - protein, 11 aa, synthetic construct [sequence omitted]

SEQ ID NO: 2584 - protein, 11 aa, synthetic construct [sequence omitted]

SEQ ID NO: 2585 - protein, 11 aa, synthetic construct [sequence omitted]

SEQ ID NO: 2586 - protein, 11 aa, synthetic construct [sequence omitted]

SEQ ID NO: 2587 - protein, 11 aa, synthetic construct [sequence omitted]

SEQ ID NO: 2588 - protein, 11 aa, synthetic construct [sequence omitted]

SEQ ID NO: 2589 - protein, 11 aa, synthetic construct [sequence omitted]

SEQ ID NO: 2590 - protein, 11 aa, synthetic construct
  REGION 1..11: note = Non-Selective Anti-FLT3 LCDR3
CQQYLSPPLTF

SEQ ID NO: 2591 - protein, 11 aa, synthetic construct [sequence omitted]

SEQ ID NO: 2592 - protein, 11 aa, synthetic construct [sequence omitted]

SEQ ID NO: 2593 - protein, 11 aa, synthetic construct [sequence omitted]

SEQ ID NO: 2594 - protein, 11 aa, synthetic construct [sequence omitted]

SEQ ID NO: 2595 - protein, 11 aa, synthetic construct [sequence omitted]

SEQ ID NO: 2596 - protein, 11 aa, synthetic construct [sequence omitted]

SEQ ID NO: 2597 - protein, 11 aa, synthetic construct [sequence omitted]

SEQ ID NO: 2598 - protein, 11 aa, synthetic construct [sequence omitted]

SEQ ID NO: 2599 - protein, 11 aa, synthetic construct [sequence omitted]

SEQ ID NO: 2600 - protein, 11 aa, synthetic construct [sequence omitted]

SEQ ID NO: 2601 - protein, 11 aa, synthetic construct
  REGION 1..11: note = Non-Selective Anti-FLT3 LCDR3
CQQYNRLPYTF

SEQ ID NO: 2602 - protein, 11 aa, synthetic construct [sequence omitted]

SEQ ID NO: 2603 - protein, 11 aa, synthetic construct [sequence omitted]

SEQ ID NO: 2604 - protein, 11 aa, synthetic construct [sequence omitted]

SEQ ID NO: 2605 - protein, 11 aa, synthetic construct [sequence omitted]

SEQ ID NO: 2606 - protein, 11 aa, synthetic construct [sequence omitted]

SEQ ID NO: 2607 - protein, 11 aa, synthetic construct [sequence omitted]

SEQ ID NO: 2608 - protein, 11 aa, synthetic construct
  REGION 1..11: note = Non-Selective Anti-FLT3 LCDR3
CQQSYSTPPTF

SEQ ID NO: 2609 - protein, 11 aa, synthetic construct [sequence omitted]

SEQ ID NO: 2610 - protein, 11 aa, synthetic construct [sequence omitted]

SEQ ID NO: 2611 - protein, 11 aa, synthetic construct [sequence omitted]

SEQ ID NO: 2612 - protein, 11 aa, synthetic construct
  REGION 1..11: note = Non-Selective Anti-FLT3 LCDR3
CQQSYSTPPTF

SEQ ID NO: 2613 - protein, 11 aa, synthetic construct [sequence omitted]

SEQ ID NO: 2614 - protein, 11 aa, synthetic construct [sequence omitted]

SEQ ID NO: 2615 - protein, 11 aa, synthetic construct [sequence omitted]

SEQ ID NO: 2616 - protein, 11 aa, synthetic construct [sequence omitted]

SEQ ID NO: 2617 - protein, 11 aa, synthetic construct [sequence omitted]

SEQ ID NO: 2618 - protein, 11 aa, synthetic construct [sequence omitted]

SEQ ID NO: 2619 - protein, 11 aa, synthetic construct [sequence omitted]

SEQ ID NO: 2620 - protein, 11 aa, synthetic construct
  REGION 1..11: note = Non-Selective Anti-FLT3 LCDR3
CQQSFITPPTF

SEQ ID NO: 2621 - protein, 10 aa, synthetic construct [sequence omitted]

SEQ ID NO: 2622 - protein, 11 aa, synthetic construct
  REGION 1..11: note = Non-Selective Anti-FLT3 LCDR3
CQQAYSLPWTF

SEQ ID NO: 2623 - protein, 126 aa, synthetic construct
  REGION 1..126: note = Non-Selective Anti-FLT3 Full VH
QVQLVQSGAEVKKPGASVKVSCKASGGTFSSDGISWVRQAPGQGLEWMGWISAYHGHTNYAQKFQGRVTMTRDTSTSTVYMELSSLRSEDTAVYYCARGGKHSGSHRSYYYGMDVWGQGTTVTVSS

SEQ ID NO: 2624 - protein, 117 aa, synthetic construct
  REGION 1..117: note = Non-Selective Anti-FLT3 Full VH
QVQLVQSGAEVKKPGASVKVSCKASGYTFTNYYMHWVRQAPGQGLEWMGVINPSGGSTNYAQKFQGRVTMTRDTSTSTVYMELSSLRSEDTAVYYCARAGVGAFHIWGQGTMVTVSS

SEQ ID NO: 2625 - protein, 127 aa, synthetic construct
  REGION 1..127: note = Non-Selective Anti-FLT3 Full VH
QVQLVQSGAEVKKPGSSVKVSCKASGYTLTELSMHWVRQAPGQGLEWMGRIIPISGTANYAQKFQGRVTITADESTSTAYMELSSLRSEDTAVYYCARAARYCSSTSCYWRDGMDVWGQGTTVTVSS

SEQ ID NO: 2626 - protein, 124 aa, synthetic construct
  REGION 1..124: note = Non-Selective Anti-FLT3 Full VH
EVQLLESGGGLVQPGGSLRLSCAASGFDFSTYNMFWVRQAPGKGLEWVSGISGSGRSKYYADSVKGRFTISRDNSKNTLYLQMNSLRAEDTAVYYCARVYYDSSGYYPYYFDYWGQGTLVTVSS

SEQ ID NO: 2627 - protein, 121 aa, synthetic construct
  REGION 1..121: note = Non-Selective Anti-FLT3 Full VH
QVQLVQSGAEVKKPGSSVKVSCKASGGSFISHTFSWVRQAPGQGLEWMGGIIPISGTANYAQKFQGRVTITADESTSTAYMELSSLRSEDTAVYYCAKGRGQLVGGYFQHWGQGTLVTVSS

SEQ ID NO: 2628 - protein, 121 aa, synthetic construct
  REGION 1..121: note = Non-Selective Anti-FLT3 Full VH
QVQLVQSGAEVKKPGSSVKVSCKASGYTFTSYYLHWVRQAPGQGLEWMGGIIPIFGKAEYSQRFQGRVTITADESTSTAYMELSSLRSEDTAVYYCAREDFWSGPYGMDVWGQGTTVTVSS

SEQ ID NO: 2629 - protein, 120 aa, synthetic construct
  REGION 1..120: note = Non-Selective Anti-FLT3 Full VH
QVQLVQSGAEVKKPGASVKVSCKASGYTFTNYYMHWVRQAPGQGLEWMGWMNPNSGNTGYAQRFQGRVTMTRDTSTSTVYMELSSLRSEDTAVYYCAKSHYYYFYGMDVWGQGTTVTVSS

SEQ ID NO: 2630 - protein, 120 aa, synthetic construct
  REGION 1..120: note = Non-Selective Anti-FLT3 Full VH
QVQLVQSGAEVKKPGASVKVSCKASGGTFSSRSISWVRQAPGQGLEWMGIINPSGGGTLYAQKFQGRVTMTRDTSTSTVYMELSSLRSEDTAVYYCAKDMDGWSDAFDIWGQGTTVTVSS

SEQ ID NO: 2631 - protein, 119 aa, synthetic construct
  REGION 1..119: note = Non-Selective Anti-FLT3 Full VH
EVQLLESGGGLVQPGGSLRLSCAASGFAFSSYVLHWVRQAPGKGLEWVAGIWVDGHNKDYADSVKGRFTISRDNSKNTLYLQMNSLRAEDTAVYYCAREFGAAGSFQHWGQGTLVTVSS

SEQ ID NO: 2632 - protein, 118 aa, synthetic construct
  REGION 1..118: note = Non-Selective Anti-FLT3 Full VH
QVQLVQSGAEVKKPGSSVKVSCKASGYTLTELSMHWVRQAPGQGLEWMGGIIPISGTTKYAQKFQGRVTITADESTSTAYMELSSLRSEDTAVYYCARASPRYYMDVWGKGTTVTVSS

SEQ ID NO: 2633 - protein, 121 aa, synthetic construct
  REGION 1..121: note = Non-Selective Anti-FLT3 Full VH
EVQLLESGGGLVQPGGSLRLSCAASGFTFSNHYMSWVRQAPGKGLEWVSAIGAGGGTYYADSVKGRFTISRDNSKNTLYLQMNSLRAEDTAVYYCAKSSGYSYGRRPFDYWGQGTLVTVSS

SEQ ID NO: 2634 - protein, 117 aa, synthetic construct
  REGION 1..117: note = Non-Selective Anti-FLT3 Full VH
QVQLVQSGAEVKKPGSSVKVSCKASGYTFTGYYMHWVRQAPGQGLEWMGGIIPILGTANNAQKFQGRVTITADESTSTAYMELSSLRSEDTAVYYCARAPWGTFDYWGQGTLVTVSS

SEQ ID NO: 2635 - protein, 123 aa, synthetic construct
  REGION 1..123: note = Non-Selective Anti-FLT3 Full VH
QVQLVQSGAEVKKPGASVKVSCKASGYTFSRYYMSWVRQAPGQGLEWMGWMNPNSGNTGYAQKFQGRVTMTRDTSTSTVYMELSSLRSEDTAVYYCARTRFAAQPHNWHFDLWGRGTLVTVSS

SEQ ID NO: 2636 - protein, 121 aa, synthetic construct
  REGION 1..121: note = Non-Selective Anti-FLT3 Full VH
QVQLVQSGAEVKKPGASVKVSCKASGYTFTTYYMHWVRQAPGQGLEWMGIINPSGGSTSYAQKFQGRVTMTRDTSTSTVYMELSSLRSEDTAVYYCARDRAARPRGGFDYWGQGTLVTVSS

SEQ ID NO: 2637 - protein, 121 aa, synthetic construct
  REGION 1..121: note = Non-Selective Anti-FLT3 Full VH
QVQLVQSGAEVKKPGASVKVSCKASGYTFTGYRMHWVRQAPGQGLEWMGWINPNSGGTNYAQKFQGRVTMTRDTSTSTVYMELSSLRSEDTAVYYCAKGGLDWRNWYFDLWGRGTLVTVSS

SEQ ID NO: 2638 - protein, 121 aa, synthetic construct
  REGION 1..121: note = Non-Selective Anti-FLT3 Full VH
QVQLVQSGAEVKKPGSSVKVSCKASGNTFTMYYMHWVRQAPGQGLEWVGAIIPISGTVIYARKFQGRVTITADESTSTAYMELSSLRSEDTAVYYCARLSGGRMYDAFDIWGQGTTVTVSS

SEQ ID NO: 2639 - protein, 117 aa, synthetic construct
  REGION 1..117: note = Non-Selective Anti-FLT3 Full VH
QVQLVQSGAEVKKPGSSVKVSCKASGYTFTTFYLHWVRQAPGQGLEWIGGIIPMSGTANYAQKFQGRVTITADESTSTAYMELSSLRSEDTAVYYCASGGENGMDVWGQGTTVTVSS

SEQ ID NO: 2640 - protein, 120 aa, synthetic construct
  REGION 1..120: note = Non-Selective Anti-FLT3 Full VH
QVQLVQSGAEVKKPGASVKVSCKASGYSFTTHYMHWVRQAPGQGLEWMGIINPSGGSTRYAQKFQGRVTMTRDTSTSTVYMELSSLRSEDTAVYYCARGSSYYYYGVDVWGKGTTVTVSS

SEQ ID NO: 2641 - protein, 119 aa, synthetic construct
  REGION 1..119: note = Non-Selective Anti-FLT3 Full VH
QVQLVQSGAEVKKPGASVKVSCKASGYTFTNYYMHWVRQAPGQGLEWMGIINPSSGSASYTQKLQGRVTMTRDTSTSTVYMELSSLRSEDTAVYYCARDRSTLVPLDYWGQGTLVTVSS

SEQ ID NO: 2642 - protein, 123 aa, synthetic construct
  REGION 1..123: note = Non-Selective Anti-FLT3 Full VH
QVQLVQSGAEVKKPGASVKVSCKASGYTFTGYYMYWVRQAPGQGLEWMGIINPRGGITSYAQRFQGRVTMTRDTSTSTVYMELSSLRSEDTAVYYCARGSTSSGWPNGDMDVWGKGTTVTVSS

SEQ ID NO: 2643 - protein, 118 aa, synthetic construct
  REGION 1..118: note = Non-Selective Anti-FLT3 Full VH
QVQLVQSGAEVKKPGASVKVSCKASGYTFTDNYMHWVRQAPGQGLEWMGWMTPDSNNTGFAQNFQGRVTMTRDTSTSTVYMELSSLRSEDTAVYYCALGDGPFGMDVWGQGTTVTVSS

SEQ ID NO: 2644 - protein, 119 aa, synthetic construct
  REGION 1..119: note = Non-Selective Anti-FLT3 Full VH
QVQLVQSGAEVKKPGASVKVSCKASGYSFTAYYMHWVRQAPGQGLEWMGIINPSGGSTSYAQKFQGRVTMTRDTSTSTVYMELSSLRSEDTAVYYCARVAGINGEMAYWGQGTLVTVSS

SEQ ID NO: 2645 - protein, 121 aa, synthetic construct
  REGION 1..121: note = Non-Selective Anti-FLT3 Full VH
QVQLVQSGAEVKKPGASVKVSCKASGYTFTNSFIHWVRQAPGQGLEWMGIINPSGGSTSYAQKFQGRVTMTRDTSTSTVYMELSSLRSEDTAVYYCAKALERRYYYGMDVWGQGTTVTVSS

SEQ ID NO: 2646 - protein, 122 aa, synthetic construct
  REGION 1..122: note = Non-Selective Anti-FLT3 Full VH
QVQLVQSGAEVKKPGSSVKVSCKASGYTFTGYYMHWVRQAPGQGLEWMGVINPIYGTANYALKFQGRVTITADESTSTAYMELSSLRSEDTAVYYCAKAISSGWSNDAFDIWGQGTMVTVSS

SEQ ID NO: 2647 - protein, 116 aa, synthetic construct
  REGION 1..116: note = Non-Selective Anti-FLT3 Full VH
QVQLVQSGAEVKKPGSSVKVSCKASGYTLTELSIHWVRQAPGQGLEWMGGIVPMSGTASYAQKFQGRVTITADESTSTAYMELSSLRSEDTAVYYCARRRDGYNSWGQGTLVTVSS

SEQ ID NO: 2648 - protein, 123 aa, synthetic construct
  REGION 1..123: note = Non-Selective Anti-FLT3 Full VH
QVQLVQSGAEVKKPGASVKVSCKASGYTFTGYYMHWVRQAPGQGLEWMGIIDPSGGSTSYAQKFQGRVTMTRDTSTSTVYMELSSLRSEDTAVYYCARDRSLLWSGVGGMDVWGQGTTVTVSS

SEQ ID NO: 2649 - protein, 125 aa, synthetic construct
  REGION 1..125: note = Non-Selective Anti-FLT3 Full VH
QVQLVQSGAEVKKPGSSVKVSCKASGYTLNELFMHWVRQAPGQGLEWVGGIIPMSGTTFYAQTFQGRVTITADESTSTAYMELSSLRSEDTAVYYCAKGVRQYSYGRYYYGMDVWGQGTLVTVSS

SEQ ID NO: 2650 - protein, 122 aa, synthetic construct
  REGION 1..122: note = Non-Selective Anti-FLT3 Full VH
QVQLVQSGAEVKKPGASVKVSCKASGGTFSSHAISWVRQAPGQGLEWMGWINPGSGGTNYAQKFQGRVTMTRDTSTSTVYMELSSLRSEDTAVYYCAKDSYDFWSGYYIDYWGQGTLVTVSS

SEQ ID NO: 2651 - protein, 120 aa, synthetic construct
  REGION 1..120: note = Non-Selective Anti-FLT3 Full VH
QVQLVQSGAEVKKPGASVKVSCKASGYTFTNYYMHWVRQAPGQGLEWMGIINPSGGSTSYAQKFQGRVTMTRDTSTSTVYMELSSLRSEDTAVYYCARGVGYSGYGADLWGRGTLVTVSS

SEQ ID NO: 2652 - protein, 122 aa, synthetic construct
  REGION 1..122: note = Non-Selective Anti-FLT3 Full VH
QVQLVQSGAEVKKPGSSVKVSCKASGGTFSSNAINWVRQAPGQGLEWMGGIIPLFGTTNYAQKFQGRVTITADESTSTAYMELSSLRSEDTAVYYCARVLSGWYGTYYFDYWGQGTLVTVSS

SEQ ID NO: 2653 - protein, 124 aa, synthetic construct
  REGION 1..124: note = Non-Selective Anti-FLT3 Full VH
QVQLVQSGAEVKKPGASVKVSCKASGYTFTSYYIHWVRQAPGQGLEWMGLINPSGGSTTYAQSFQGRVTMTRDTSTSTVYMELSSLRSEDTAVYYCARGLGWGVVVPAAELDYWGQGTLVTVSS

SEQ ID NO: 2654 - protein, 124 aa, synthetic construct
  REGION 1..124: note = Non-Selective Anti-FLT3 Full VH
QVQLVQSGAEVKKPGASVKVSCKASGYTFTSYGIHWVRQAPGQGLEWMGGIIPIFGTASYAQKFQGRVTMTRDTSTSTVYMELSSLRSEDTAVYYCTRSNGIAAAGTHWYFDLWGRGTLVTVSS

SEQ ID NO: 2655 - protein, 119 aa, synthetic construct
  REGION 1..119: note = Non-Selective Anti-FLT3 Full VH
QVQLVQSGAEVKKPGASVKVSCKASGYTFTSYYLHWVRQAPGQGLEWIGVINPSGGSTTYAQRFQGRVTMTRDTSTSTVYMELSSLRSEDTAVYYCARGIGYGGYFDYWGQGTLVTVSS

SEQ ID NO: 2656 - protein, 117 aa, synthetic construct
  REGION 1..117: note = Non-Selective Anti-FLT3 Full VH
QVQLVQSGAEVKKPGSSVKVSCKASGHTFTAYYMHWVRQAPGQGLEWMGWMSPYSGNTGYAQNFQGRVTITADESTSTAYMELSSLRSEDTAVYYCARATRGTIQHWGQGTLVTVSS

SEQ ID NO: 2657 - protein, 119 aa, synthetic construct
  REGION 1..119: note = Non-Selective Anti-FLT3 Full VH
QVQLVQSGAEVKKPGASVKVSCKASGYTFTGYYMHWVRQAPGQGLEWMGIINPSGGSTSYAQKFQGRVTMTRDTSTSTVYMELSSLRSEDTAVYYCARDPGRLGELDYWGQGTLVTVSS

SEQ ID NO: 2658 - protein, 117 aa, synthetic construct
  REGION 1..117: note = Non-Selective Anti-FLT3 Full VH
QVQLVQSGAEVKKPGSSVKVSCKASGGTFSSYAISWVRQAPGQGLEWMGGIIPILGIANYAQKFQGRVTITADESTSTAYMELSSLRSEDTAVYYCAHVDGYGMDVWGQGTTVTVSS

SEQ ID NO: 2659 - protein, 121 aa, synthetic construct
  REGION 1..121: note = Non-Selective Anti-FLT3 Full VH
QVQLVQSGAEVKKPGASVKVSCKASGYTFTSYYMHWVRQAPGQGLEWMGLINPSSGSTSYARNFQGRVTMTRDTSTSTVYMELSSLRSEDTAVYYCARSGSGGSYFLFDYWGQGTLVTVSS

SEQ ID NO: 2660 - protein, 119 aa, synthetic construct
  REGION 1..119: note = Non-Selective Anti-FLT3 Full VH
QVQLVQSGAEVKKPGASVKVSCKASGYTFTIYYMHWVRQAPGQGLEWMGIINPSGGSTVYAQTFQGRVTMTRDTSTSTVYMELSSLRSEDTAVYYCARGIGSKGAFDIWGQGTMVTVSS

SEQ ID NO: 2661 - protein, 122 aa, synthetic construct
  REGION 1..122: note = Non-Selective Anti-FLT3 Full VH
QVQLVQSGAEVKKPGSSVKVSCKASGGTFSSYAISWVRQAPGQGLEWMGGIIPILGTANYAQKFQGRVTITADESTSTAYMELSSLRSEDTAVYYCARTMTTVTYYDAFDIWGQGTMVTVSS

SEQ ID NO: 2662 - protein, 118 aa, synthetic construct
  REGION 1..118: note = Non-Selective Anti-FLT3 Full VH
QVQLVQSGAEVKKPGASVKVSCKASGYTFTSYYMHWVRQAPGQGLEWMGIINPSSGSTTYALKFQGRVTMTRDTSTSTVYMELSSLRSEDTAVYYCARGLGKSAIDYWGQGTLVTVSS

SEQ ID NO: 2663 - protein, 120 aa, synthetic construct
  REGION 1..120: note = Non-Selective Anti-FLT3 Full VH
QVQLVQSGAEVKKPGASVKVSCKASGYTFTRHYVHWVRQAPGQGLEWMGIINPSGGSTSYAQKFQGRVTMTRDTSTSTVYMELSSLRSEDTAVYYCARSYHHYYYGMDVWGQGTTVTVSS

SEQ ID NO: 2664 - protein, 116 aa, synthetic construct
  REGION 1..116: note = Non-Selective Anti-FLT3 Full VH
QVQLVQSGAEVKKPGSSVKVSCKASGGTFSSATISWVRQAPGQGLEWMGGIIPMFGTANYAQKFQGRVTITADESTSTAYMELSSLRSEDTAVYYCARDAYGDSTWGQGTLVTVSS

SEQ ID NO: 2665 - protein, 121 aa, synthetic construct
  REGION 1..121: note = Non-Selective Anti-FLT3 Full VH
QVQLVQSGAEVKKPGSSVKVSCKASGGTFSSHAFNWVRQAPGQGLEWMGGISPMFGTPNYAQKFQGRVTITADESTSTAYMELSSLRSEDTAVYYCARAPDYGDDWYFDLWGRGTLVTVSS

SEQ ID NO: 2666 - protein, 120 aa, synthetic construct
  REGION 1..120: note = Non-Selective Anti-FLT3 Full VH
QVQLVQSGAEVKKPGASVKVSCKASGYTFTSYYMHWVRQAPGQGLEWMGRINPSGGSTSYAQSFQGRVTMTRDTSTSTVYMELSSLRSEDTAVYYCARVPGLYGGAIDYWGQGTLVTVSS

SEQ ID NO: 2667 - protein, 120 aa, synthetic construct
  REGION 1..120: note = Non-Selective Anti-FLT3 Full VH
QVQLVQSGAEVKKPGSSVKVSCKASGYTFTGFYIHWVRQAPGQGLEWMGGVIPFFSRTIYAQKFQGRVTITADESTSTAYMELSSLRSEDTAVYYCAYGANGHLYGMDAWGQGTTVTVSS

SEQ ID NO: 2668 - protein, 124 aa, synthetic construct
  REGION 1..124: note = Non-Selective Anti-FLT3 Full VH
QVQLVQSGAEVKKPGSSVKVSCKASGGTFTSYFMHWVRQAPGQGLEWMGGIIPMFGAPVYAQDFQGRVTITADESTSTAYMELSSLRSEDTAVYYCAAGLDFWSGPDNYYMDVWGKGTTVTVSS

SEQ ID NO: 2669 - protein, 120 aa, synthetic construct
  REGION 1..120: note = Non-Selective Anti-FLT3 Full VH
QVQLVQSGAEVKKPGASVKVSCKASGGTLMSYAISWVRQAPGQGLEWMGIINPRGGTTRYAQKFQGRVTMTRDTSTSTVYMELSSLRSEDTAVYYCARSEDSGYDYLDYWGQGTLVTVSS

SEQ ID NO: 2670 - protein, 120 aa, synthetic construct
  REGION 1..120: note = Non-Selective Anti-FLT3 Full VH
QVQLVQSGAEVKKPGASVKVSCKASGYTFTGYYMHWVRQAPGQGLEWMGVINPNGGSISYAQKFQGRVTMTRDTSTSTVYMELSSLRSEDTAVYYCAREGWFGEDGMDVWGQGTTVTVSS

SEQ ID NO: 2671 - protein, 119 aa, synthetic construct
  REGION 1..119: note = Non-Selective Anti-FLT3 Full VH
QVQLVQSGAEVKKPGASVKVSCKASGYTFTSDGISWVRQAPGQGLEWMGWMNPNSGNAGYAQKFQGRVTMTRDTSTSTVYMELSSLRSEDTAVYYCATAVAGTDAFDIWGQGTMVTVSS

SEQ ID NO: 2672 - protein, 121 aa, synthetic construct
  REGION 1..121: note = Non-Selective Anti-FLT3 Full VH
QVQLVQSGAEVKKPGSSVKVSCKASGYTLTSFAMHWVRQAPGQGLEWMGRIIPMSGTANYAQKFQGRVTITADESTSTAYMELSSLRSEDTAVYYCASTSPDQYYYGMDVWGQGTTVTVSS

SEQ ID NO: 2673 - protein, 121 aa, synthetic construct
  REGION 1..121: note = Non-Selective Anti-FLT3 Full VH
QVQLVQSGAEVKKPGSSVKVSCKASGGTFSSDAINWVRQAPGQGLEWMGGIIPIVGTPTYAQKFQGRVTITADESTSTAYMELSSLRSEDTAVYYCAKGLAFGVFDGLDVWGQGTTVTVSS

SEQ ID NO: 2674 - protein, 120 aa, synthetic construct
  REGION 1..120: note = Non-Selective Anti-FLT3 Full VH
QVQLVQSGAEVKKPGSSVKVSCKASGYTLTDLSIHWVRQAPGQGLEWVGGIIPMSGTANYAQKFQGRVTITADESTSTAYMELSSLRSEDTAVYYCARSSSSWPKYFQHWGQGTLVTVSS

SEQ ID NO: 2675 - protein, 117 aa, synthetic construct
  REGION 1..117: note = Non-Selective Anti-FLT3 Full VH
QVQLVQSGAEVKKPGSSVKVSCKASGYTFTTYFMHWVRQAPGQGLEWMGGIVPVFGTTKYAQKFQGRVTITADESTSTAYMELSSLRSEDTAVYYCASSAVGWFDPWGQGTLVTVSS

SEQ ID NO: 2676 - protein, 121 aa, synthetic construct
  REGION 1..121: note = Non-Selective Anti-FLT3 Full VH
QVQLVQSGAEVKKPGASVKVSCKASGYTFTSHYMHWVRQAPGQGLEWMGWISPYNGNTNYAQKLQGRVTMTRDTSTSTVYMELSSLRSEDTAVYYCARGESNSGWINFDYWGQGTLVTVSS

SEQ ID NO: 2677 - protein, 121 aa, synthetic construct
  REGION 1..121: note = Non-Selective Anti-FLT3 Full VH
QVQLVQSGAEVKKPGSSVKVSCKASGYTLTELSMHWVRQAPGQGLEWMGGIIPISGTVTYAQKFQGRVTITADESTSTAYMELSSLRSEDTAVYYCANKGQQLVRGYFQHWGQGTLVTVSS

SEQ ID NO: 2678 - protein, 118 aa, synthetic construct
  REGION 1..118: note = Non-Selective Anti-FLT3 Full VH
QVQLVQSGAEVKKPGASVKVSCKASGYTFATYYLHWVRQAPGQGLEWMGMINPSGGSTIYAQKFQGRVTMTRDTSTSTVYMELSSLRSEDTAVYYCARSSGYDFFDYWGQGTLVTVSS

SEQ ID NO: 2679 - protein, 120 aa, synthetic construct
  REGION 1..120: note = Non-Selective Anti-FLT3 Full VH
QVQLVQSGAEVKKPGASVKVSCKASGYTFTNYFMHWVRQAPGQGLEWMGIINPSGGSTSYAQKFQGRVTMTRDTSTSTVYMELSSLRSEDTAVYYCARAHTVYYYGMDVWGQGTMVTVSS

SEQ ID NO: 2680 - protein, 118 aa, synthetic construct
  REGION 1..118: note = Non-Selective Anti-FLT3 Full VH
QVQLVQSGAEVKKPGASVKVSCKASGGTFGSYAISWVRQAPGQGLEWMGWINPNTGGAHYAQKFQGRVTMTRDTSTSTVYMELSSLRSEDTAVYYCARVGAAAGYQHWGQGTLVTVSS

SEQ ID NO: 2681 - protein, 120 aa, synthetic construct
  REGION 1..120: note = Non-Selective Anti-FLT3 Full VH
QVQLVQSGAEVKKPGSSVKVSCKASGYTFTSSEINWVRQAPGQGLEWMGGIHPMFGTTNYAQKFQGRVTITADESTSTAYMELSSLRSEDTAVYYCARARLMVYAPSDYWGQGTLVTVSS

SEQ ID NO: 2682 - protein, 120 aa, synthetic construct
  REGION 1..120: note = Non-Selective Anti-FLT3 Full VH
QVQLVQSGAEVKKPGASVKVSCKASGYTFTNYYVHWVRQAPGQGLEWMGMINPSGGSTNYAQKFQGRVTMTRDTSTSTVYMELSSLRSEDTAVYYCARVSGWKRGWFDPWGQGTLVTVSS

SEQ ID NO: 2683 - protein, 121 aa, synthetic construct
  REGION 1..121: note = Non-Selective Anti-FLT3 Full VH
QVQLVQSGAEVKKPGASVKVSCKASGYTFTRYYMHWVRQAPGQGLEWMGIINPSGGSASYAQKFQGRVTMTRDTSTSTVYMELSSLRSEDTAVYYCARDLGGAAAGYFDYWGQGTLVTVSS

SEQ ID NO: 2684 - protein, 120 aa, synthetic construct
  REGION 1..120: note = Non-Selective Anti-FLT3 Full VH
QVQLVQSGAEVKKPGASVKVSCKASGFTFSDYGYYMHWVRQAPGQGLEWMGWMDPSSGHTGYAQRFQGRVTMTRDTSTSTVYMELSSLRSEDTAVYYCAKDIGWGAFDIWGQGTTVTVSS

SEQ ID NO: 2685 - protein, 121 aa, synthetic construct
  REGION 1..121: note = Non-Selective Anti-FLT3 Full VH
QVQLVQSGAEVKKPGSSVKVSCKASGGTFSSYAISWVRQAPGQGLEWMGGIIPIVGVANYAQKLQGRVTITADESTSTAYMELSSLRSEDTAVYYCAKDIGGYPSDAFDIWGQGTTVTVSS

SEQ ID NO: 2686 - protein, 130 aa, synthetic construct
  REGION 1..130: note = Non-Selective Anti-FLT3 Full VH
QVQLVQSGAEVKKPGSSVKVSCKASGYTLTELSMHWVRQAPGQGLEWMGGIIPISSATSIPQKFQGRVTITADESTSTAYMELSSLRSEDTAVYYCARGALYSSSPVRVVAGTKGWFDPWGQGTLVTVSS

SEQ ID NO: 2687 - protein, 118 aa, synthetic construct
  REGION 1..118: note = Non-Selective Anti-FLT3 Full VH
QVQLVQSGAEVKKPGSSVKVSCKASGHTFTSDYMHWVRQAPGQGLEWMGRIIPIFGTADYAQKFQGRVTITADESTSTAYMELSSLRSEDTAVYYCARDDSSGIFDYWGQGTLVTVSS

SEQ ID NO: 2688 - protein, 119 aa, synthetic construct
  REGION 1..119: note = Non-Selective Anti-FLT3 Full VH
QVQLVQSGAEVKKPGSSVKVSCKASGYSLTELSIHWVRQAPGQGLEWMGGINPISGTANYAQKFQGRVTITADESTSTAYMELSSLRSEDTAVYYCARGTVRLNWFDPWGQGTLVTVSS

SEQ ID NO: 2689 - protein, 123 aa, synthetic construct
  REGION 1..123: note = Non-Selective Anti-FLT3 Full VH
QVQLVQSGAEVKKPGSSVKVSCKASGYTLTSFGISWVRQAPGQGLEWVGMIIPLSGTTHYAQKFQGRVTITADESTSTAYMELSSLRSEDTAVYYCANLYGGNAYYYYGMDVWGQGTTVTVSS

SEQ ID NO: 2690 - protein, 125 aa, synthetic construct
  REGION 1..125: note = Non-Selective Anti-FLT3 Full VH
QVQLVQSGAEVKKPGSSVKVSCKASGGTFSTYALSWVRQAPGQGLEWMGGVIPVFGTTDYAHKFQGRVTITADESTSTAYMELSSLRSEDTAVYYCASMIIFGAGGWDAYYFQEWGQGTLVTVSS

SEQ ID NO: 2691 - protein, 118 aa, synthetic construct
  REGION 1..118: note = Non-Selective Anti-FLT3 Full VH
QVQLVQSGAEVKKPGASVKVSCKASGGSFSSYALHWVRQAPGQGLEWMGLINPSGGRTSYAQKFQGRVTMTRDTSTSTVYMELSSLRSEDTAVYYCARDEGYATFDYWGQGTLVTVSS

SEQ ID NO: 2692 - protein, 123 aa, synthetic construct
  REGION 1..123: note = Non-Selective Anti-FLT3 Full VH
QVQLVQSGAEVKKPGASVKVSCKASGGTFSSYYMHWVRQAPGQGLEWMGWISAYNGNTNYAQKLQGRVTMTRDTSTSTVYMELSSLRSEDTAVYYCAKDMGYYYDSSGGFDYWGQGTLVTVSS

SEQ ID NO: 2693 - protein, 122 aa, synthetic construct
  REGION 1..122: note = Non-Selective Anti-FLT3 Full VH
QVQLVQSGAEVKKPGSSVKVSCKASGGTFSSYAISWVRQAPGQGLEWMGGIIPIFGTANYAQKFQGRVTITADESTSTAYMELSSLRSEDTAVYYCARDLSIGYYGDAFDIWGQGTMVTVSS

SEQ ID NO: 2694 - protein, 118 aa, synthetic construct
  REGION 1..118: note = Non-Selective Anti-FLT3 Full VH
QVQLVQSGAEVKKPGSSVKVSCKASGYIFTNYYIQWVRQAPGQGLEWMGGIIPIFGTVGYAQKFQGRVTITADESTSTAYMELSSLRSEDTAVYYCARGRIGGGNDYWGQGTLVTVSS

SEQ ID NO: 2695 - protein, 117 aa, synthetic construct
  REGION 1..117: note = Non-Selective Anti-FLT3 Full VH
QVQLVQSGAEVKKPGSSVKVSCKASGDTFNSYAVNWVRQAPGQGLEWMGGIIPSFGTPTYAWKFQGRVTITADESTSTAYMELSSLRSEDTAVYYCASVSYGSFDYWGQGTLVTVSS

SEQ ID NO: 2696 - protein, 121 aa, synthetic construct
  REGION 1..121: note = Non-Selective Anti-FLT3 Full VH
QVQLVQSGAEVKKPGSSVKVSCKASGYTFTYRYLHWVRQAPGQGLEWMGRITPISGTTNYAQKFQGRVTITADESTSTAYMELSSLRSEDTAVYYCAKDSGQLAHYGMDVWGQGTTVTVSS

SEQ ID NO: 2697 - protein, 118 aa, synthetic construct
  REGION 1..118: note = Non-Selective Anti-FLT3 Full VH
QVQLVQSGAEVKKPGSSVKVSCKASGYTFTSYYMHWVRQAPGQGLEWMGWMNPYSGNTGYAQKFQGRVTITADESTSTAYMELSSLRSEDTAVYYCARVGSGWYSDYWGQGTLVTVSS

SEQ ID NO: 2698 - protein, 119 aa, synthetic construct
  REGION 1..119: note = Non-Selective Anti-FLT3 Full VH
QVQLVQSGAEVKKPGSSVKVSCKASGYTFTRFNIHWVRQAPGQGLEWMGWLNPFTGNTGYARKFQGRVTITADESTSTAYMELSSLRSEDTAVYYCASSSSWYGWFDPWGQGTLVTVSS

SEQ ID NO: 2699 - protein, 119 aa, synthetic construct
  REGION 1..119: note = Non-Selective Anti-FLT3 Full VH
QVQLVQSGAEVKKPGSSVKVSCKASGYTFTGYYMHWVRQAPGQGLEWMGWIDPNSGGTNYAQKFQGRVTITADESTSTAYMELSSLRSEDTAVYYCARDVDTAMVTDYWGRGTLVTVSS

SEQ ID NO: 2700 - protein, 119 aa, synthetic construct
  REGION 1..119: note = Non-Selective Anti-FLT3 Full VH
QVQLVQSGAEVKKPGASVKVSCKASGYTFTSYYMHWVRQAPGQGLEWMGIINPSSGSTTYAQKFQGRVTMTRDTSTSTVYMELSSLRSEDTAVYYCARSVGATSAFDIWGQGTMVTVSS

SEQ ID NO: 2701 - protein, 120 aa, synthetic construct
  REGION 1..120: note = Non-Selective Anti-FLT3 Full VH
QVQLVQSGAEVKKPGASVKVSCKASGYTFTKYYMHWVRQAPGQGLEWMGIINPSGGSTSYAQKFQGRVTMTRDTSTSTVYMELSSLRSEDTAVYYCARGRGYSYGYLDYWGQGTLVTVSS

SEQ ID NO: 2702 - protein, 122 aa, synthetic construct
  REGION 1..122: note = Non-Selective Anti-FLT3 Full VH
QVQLVQSGAEVKKPGASVKVSCKASGYTFTRYYMHWVRQAPGQGLEWMGIINPSGGSTSYAQKFQGRVTMTRDTSTSTVYMELSSLRSEDTAVYYCARGETRSYAPYGMDVWGQGTTVTVSS

SEQ ID NO: 2703 - protein, 116 aa, synthetic construct
  REGION 1..116: note = Non-Selective Anti-FLT3 Full VH
QVQLVQSGAEVKKPGASVKVSCKASGYTFNSYGISWVRQAPGQGLEWMGIINPTGGSTTYAQKFQGRVTMTRDTSTSTVYMELSSLRSEDTAVYYCAKDPFVMDVWGQGTTVTVSS

SEQ ID NO: 2704 - protein, 119 aa, synthetic construct
  REGION 1..119: note = Non-Selective Anti-FLT3 Full VH
QVQLVQSGAEVKKPGASVKVSCKASGGTFSSYAISWVRQAPGQGLEWMGWMNPNSGDTGYAQKFQGRVTMTRDTSTSTVYMELSSLRSEDTAVYYCARDFEGGGWFDPWGQGTLVTVSS

SEQ ID NO: 2705 - protein, 120 aa, synthetic construct
  REGION 1..120: note = Non-Selective Anti-FLT3 Full VH
QVQLVQSGAEVKKPGASVKVSCKASGYTFTSYYMDWVRQAPGQGLEWMGRINPSSGSTTYVQKFQGRVTMTRDTSTSTVYMELSSLRSEDTAVYYCARTPSGSYSDFDYWGQGTLVTVSS

SEQ ID NO: 2706 - protein, 122 aa, synthetic construct
  REGION 1..122: note = Non-Selective Anti-FLT3 Full VH
QVQLVQSGAEVKKPGASVKVSCKASGYTFTSYYMHWVRQAPGQGLEWMGVINPSGGSTTYAQKFQGRVTMTRDTSTSTVYMELSSLRSEDTAVYYCARVPGVSPGDYGMDVWGQGTTVTVSS

SEQ ID NO: 2707 - protein, 118 aa, synthetic construct
  REGION 1..118: note = Non-Selective Anti-FLT3 Full VH
QVQLVQSGAEVKKPGSSVKVSCKASGYSFTNYYMHWVRQAPGQGLEWMGGIIPVFGTTTYSQTFQGRVTITADESTSTAYMELSSLRSEDTAVYYCARESQDGDFDYWGQGTLVTVSS

SEQ ID NO: 2708 - protein, 117 aa, synthetic construct
  REGION 1..117: note = Non-Selective Anti-FLT3 Full VH
QVQLVQSGAEVKKPGASVKVSCKASGYTFTSYGISWVRQAPGQGLEWMGWISPNSGVTNYAQKFQGRVTMTRDTSTSTVYMELSSLRSEDTAVYYCVSDDYGAFDYWGQGTLVTVSS

SEQ ID NO: 2709 - protein, 118 aa, synthetic construct
  REGION 1..118: note = Non-Selective Anti-FLT3 Full VH
QVQLVQSGAEVKKPGASVKVSCKASGYTFTRHYVHWVRQAPGQGLEWVGIINPSSGSASYAQKFQGRVTMTRDTSTSTVYMELSSLRSEDTAVYYCARDRLRSRFDYWGQGTLVTVSS

SEQ ID NO: 2710 - protein, 120 aa, synthetic construct
  REGION 1..120: note = Non-Selective Anti-FLT3 Full VH
QVQLVQSGAEVKKPGASVKVSCKASGYTFTTYDINWVRQAPGQGLEWMGWMNPSSGNSGFAQQFQGRVTMTRDTSTSTVYMELSSLRSEDTAVYYCAREDYYDSSGYYNWGQGTLVTVSS

SEQ ID NO: 2711 - protein, 119 aa, synthetic construct
  REGION 1..119: note = Non-Selective Anti-FLT3 Full VH
QVQLVQSGAEVKKPGASVKVSCKASGYTFTSYGISWVRQAPGQGLEWMGWMNPISGNTDYAPNFQGRVTMTRDTSTSTVYMELSSLRSEDTAVYYCVVERRREVGMDVWGQGTTVTVSS

SEQ ID NO: 2712 - protein, 123 aa, synthetic construct
  REGION 1..123: note = Non-Selective Anti-FLT3 Full VH
QVQLVQSGAEVKKPGASVKVSCKASGGTFTSYYMHWVRQAPGQGLEWMGWISAYNGKTDYAQKFQGRVTMTRDTSTSTVYMELSSLRSEDTAVYYCARDQGYYYDSSGAFDIWGQGTLVTVSS

SEQ ID NO: 2713 - protein, 119 aa, synthetic construct
  REGION 1..119: note = Non-Selective Anti-FLT3 Full VH
QVQLVQSGAEVKKPGASVKVSCKASGYTFTSYYMHWVRQAPGQGLEWMGIINPSGGSTVYAQTFQGRVTMTRDTSTSTVYMELSSLRSEDTAVYYCARGIGSKGAFDIWGQGTMVTVSS

SEQ ID NO: 2714 - protein, 118 aa, synthetic construct
  REGION 1..118: note = Non-Selective Anti-FLT3 Full VH
QVQLVQSGAEVKKPGASVKVSCKASGYTFTSYGISWVRQAPGQGLEWMGWINPNSGGTNYAQKFQGRVTMTRDTSTSTVYMELSSLRSEDTAVYYCARQGGLRDFDYWGQGTLVTVSS

SEQ ID NO: 2715 - protein, 129 aa, synthetic construct
  REGION 1..129: note = Non-Selective Anti-FLT3 Full VH
QVQLVQSGAEVKKPGSSVKVSCKASGYMFTTPYIHWVRQAPGQGLEWMGVINPISGTTTYAQKFQGRVTITADESTSTAYMELSSLRSEDTAVYYCANDRHYDFWSGYYKEEWEYFQHWGQGTLVTVSS

SEQ ID NO: 2716 - protein, 118 aa, synthetic construct
  REGION 1..118: note = Non-Selective Anti-FLT3 Full VH
QVQLVQSGAEVKKPGASVKVSCKASGYTFTSNNMHWVRQAPGQGLEWMGWINLNSGGTNYAQKFQGRVTMTRDTSTSTVYMELSSLRSEDTAVYYCAKAIDYYYMDVWGKGTTVTVSS

SEQ ID NO: 2717 - protein, 108 aa, synthetic construct
  REGION 1..108: note = Non-Selective Anti-FLT3 Full VL
DIQMTQSPSSLSASVGDRVTITCRASHNIGNKLAWYQQKPGKAPKLLIYGATTLQSGVPSRFSGSGSGTDFTLTISSLQPEDFATYYCQQANSFPRTFGPGTKVDIKR

SEQ ID NO: 2718 - protein, 108 aa, synthetic construct
  REGION 1..108: note = Non-Selective Anti-FLT3 Full VL
DIQMTQSPSSLSASVGDRVTITCRASQSIRSWLAWYQQKPGKAPKLLIYDASNLETGVPSRFSGSGSGTDFTLTISSLQPEDFATYYCQQIYSLPRTFGQGTKVEIKR

SEQ ID NO: 2719 - protein, 114 aa, synthetic construct
  REGION 1..114: note = Non-Selective Anti-FLT3 Full VL
DIVMTQSPDSLAVSLGERATINCKSSQSVLYSSNNKNYLAWYQQKPGQPPKLLIYWASTRASGVPDRFSGSGSGTDFTLTISSLQAEDVAVYYCQQYYSTPQTFGQGTKLEIKR

SEQ ID NO: 2720 - protein, 108 aa, synthetic construct
  REGION 1..108: note = Non-Selective Anti-FLT3 Full VL
DIQMTQSPSSLSASVGDRVTITCRASQSIGSNLDWYQQKPGKAPKLLIYDASSLQSGVPSRFSGSGSGTDFTLTISSLQPEDFATYYCQQSYSTPYTFGQGTKLEIKR

SEQ ID NO: 2721 - protein, 113 aa, synthetic construct; identical to SEQ ID NO: 1094
  REGION 1..113: note = Non-Selective Anti-FLT3 Full VL

SEQ ID NO: 2722 - protein, 108 aa, synthetic construct
  REGION 1..108: note = Non-Selective Anti-FLT3 Full VL
DIQMTQSPSSLSASVGDRVTITCRASQAISSYLAWYQQKPGKAPKLLIYAASNLQGGVPSRFSGSGSGTDFTLTISSLQPEDFATYYCQQSYSTPLTFGGGTKVEIKR

SEQ ID NO: 2723 - protein, 108 aa, synthetic construct
  REGION 1..108: note = Non-Selective Anti-FLT3 Full VL
DIQMTQSPSSLSASVGDRVTITCQASHDISKYLNWYQQKPGKAPKLLIYAASILQSGVPSRFSGSGSGTDFTLTISSLQPEDFATYYCQQSYSTPYTFGQGTKLEIKR

SEQ ID NO: 2724 - protein, 109 aa, synthetic construct
  REGION 1..109: note = Non-Selective Anti-FLT3 Full VL
EIVMTQSPATLSVSPGERATLSCRASQSLSNIYLAWYQQKPGQAPRLLIYDVSSRAAGIPARFSGSGSGTEFTLTISSLQSEDFAVYYCQQYATSPLTFGGGTKVEIKR

SEQ ID NO: 2725 - protein, 108 aa, synthetic construct
  REGION 1..108: note = Non-Selective Anti-FLT3 Full VL
DIQMTQSPSSLSASVGDRVTITCRASQSISTWLAWYQQKPGKAPKLLIYDASKLETGVPSRFSGSGSGTDFTLTISSLQPEDFATYYCQQSYTTPYTFGQGTKVEIKR

SEQ ID NO: 2726 - protein, 114 aa, synthetic construct
  REGION 1..114: note = Non-Selective Anti-FLT3 Full VL
DIVMTQSPDSLAVSLGERATINCKSSQSVFYSSNNKNYLAWYQQKPGQPPKLLIYWASTRASGVPDRFSGSGSGTDFTLTISSLQAEDVAVYYCHQYYSKPPTFGQGTKVEIKR

SEQ ID NO: 2727 - protein, 108 aa, synthetic construct
  REGION 1..108: note = Non-Selective Anti-FLT3 Full VL
DIQMTQSPSSLSASVGDRVTITCRASQGISNNLAWYQQKPGKAPKLLIYAASTLHNGVPSRFSGSGSGTDFTLTISSLQPEDFATYYCQQYGRSPKTFGQGTKVEIKR

SEQ ID NO: 2728 - protein, 109 aa, synthetic construct
  REGION 1..109: note = Non-Selective Anti-FLT3 Full VL
EIVMTQSPATLSVSPGERATLSCRASQSVSSSQLAWYQQKPGQAPRLLIYDTSTRATGIPARFSGSGSGTEFTLTISSLQSEDFAVYYCQQYDNSLWTFGQGTRLEIKR

SEQ ID NO: 2729 - protein, 108 aa, synthetic construct
  REGION 1..108: note = Non-Selective Anti-FLT3 Full VL
DIQMTQSPSSLSASVGDRVTITCRASQSISSYLNWYQQKPGKAPKLLIYDASNLKTGVPSRFSGSGSGTDFTLTISSLQPEDFATYYCQQSYSTPLTFGPGTKVDIKR

SEQ ID NO: 2730 - protein, 107 aa, synthetic construct
  REGION 1..107: note = Non-Selective Anti-FLT3 Full VL
DIQMTQSPSSLSASVGDRVTITCRASQGIRNHLAWYQQKPGKAPKLLIYAASSLQSGVPSRFSGSGSGTDFTLTISSLQPEDFATYYCQQSYSTPTFGQGTKVEIKR

SEQ ID NO: 2731 - protein, 108 aa, synthetic construct
  REGION 1..108: note = Non-Selective Anti-FLT3 Full VL
DIQMTQSPSSLSASVGDRVTITCRASQGISSYLAWYQQKPGKAPKLLIYAASTLQSGVPSRFSGSGSGTDFTLTISSLQPEDFATYYCQQSYSTPLTFGGGTKVEIKR

SEQ ID NO: 2732 - protein, 113 aa, synthetic construct
  REGION 1..113: note = Non-Selective Anti-FLT3 Full VL
DIVMTQSPLSLPVTPGEPASISCRSSQSLLHSNGYNYLDWYLQKPGQSPQLLIYLGSNRASGVPDRFSGSGSGTDFTLKISRVEAEDVGVYYCMQALQTPLTFGQGTKVEIKR

SEQ ID NO: 2733 - protein, 114 aa, synthetic construct
  REGION 1..114: note = Non-Selective Anti-FLT3 Full VL
DIVMTQSPDSLAVSLGERATINCKSSQSVLYSVNNKNYLAWYQQKPGQPPKLLIYWASTRESGVPDRFSGSGSGTDFTLTISSLQAEDVAVYYCQQYYSAPPTFGQGTKVEIKR

SEQ ID NO: 2734 - protein, 108 aa, synthetic construct
  REGION 1..108: note = Non-Selective Anti-FLT3 Full VL
DIQMTQSPSSLSASVGDRVTITCRASQSISTWLAWYQQKPGKAPKLLIYAASSLQSGVPSRFSGSGSGTDFTLTISSLQPEDFATYYCQQAISFPLTFGGGTKVEIKR

SEQ ID NO: 2735 - protein, 108 aa, synthetic construct
  REGION 1..108: note = Non-Selective Anti-FLT3 Full VL
DIQMTQSPSSLSASVGDRVTITCRASQGIRSELSWYQQKPGKAPKLLIYKASSLESGVPSRFSGSGSGTDFTLTISSLQPEDFATYYCLQHNSYPLTFGGGTKVEIKR

SEQ ID NO: 2736 - protein, 108 aa, synthetic construct
  REGION 1..108: note = Non-Selective Anti-FLT3 Full VL
DIQMTQSPSSLSASVGDRVTITCRASQGIRNDLGWYQQKPGKAPKLLIYAASSLQSGVPSRFSGSGSGTDFTLTISSLQPEDFATYYCQQANRFPPTFGQGTKVEIKR

SEQ ID NO: 2737 - protein, 113 aa, synthetic construct
  REGION 1..113: note = Non-Selective Anti-FLT3 Full VL
DIVMTQSPLSLPVTPGEPASISCRSSQSLLHSNGYNYLDWYLQKPGQSPQLLIYGASYLQSGVPDRFSGSGSGTDFTLKISRVEAEDVGVYYCMQALQGPITFGQGTKVEIKR

SEQ ID NO: 2738 - protein, 108 aa, synthetic construct
  REGION 1..108: note = Non-Selective Anti-FLT3 Full VL
DIQMTQSPSSLSASVGDRVTITCRASQDISNYLAWYQQKPGKAPKLLIYAASTLQSGVPSRFSGSGSGTDFTLTISSLQPEDFATYYCQQSYRTPYTFGQGTKVEIKR

SEQ ID NO: 2739 - protein, 108 aa, synthetic construct
  REGION 1..108: note = Non-Selective Anti-FLT3 Full VL
DIQMTQSPSSLSASVGDRVTITCRASQGISNYLAWYQQKPGKAPKLLIYDGSNLETGVPSRFSGSGSGTDFTLTISSLQPEDFATYYCQQSYSTPLTFGQGTKVEIKR

SEQ ID NO: 2740 - protein, 108 aa, synthetic construct
  REGION 1..108: note = Non-Selective Anti-FLT3 Full VL
EIVMTQSPATLSVSPGERATLSCRASQSVSSDFLAWYQQKPGQAPRLLIYDTSSRASGIPARFSGSGSGTEFTLTISSLQSEDFAVYYCQQYAGPPTFGQGTRLEIKR

SEQ ID NO: 2741 - protein, 112 aa, synthetic construct
  REGION 1..112: note = Non-Selective Anti-FLT3 Full VL
DIVMTQSPDSLAVSLGERATINCKSSQSLLYGSKNYISWYQQKPGQPPKLLIYSSSTRESGVPDRFSGSGSGTDFTLTISSLQAEDVAVYYCQQYYTTPYTFGQGTKVEIKR

SEQ ID NO: 2742 - protein, 108 aa, synthetic construct
  REGION 1..108: note = Non-Selective Anti-FLT3 Full VL
DIQMTQSPSSLSASVGDRVTITCRASQGISNYLAWYQQKPGKAPKLLIYGASNLQSGVPSRFSGSGSGTDFTLTISSLQPEDFATYYCQQSYGTPYTFGQGTKLEIKR

SEQ ID NO: 2743 - protein, 108 aa, synthetic construct
  REGION 1..108: note = Non-Selective Anti-FLT3 Full VL
DIQMTQSPSSLSASVGDRVTITCRASQSVSSYLNWYQQKPGKAPKLLIYGASNLQSGVPSRFSGSGSGTDFTLTISSLQPEDFATYYCQQSYTTPWTFGQGTRLEIKR

SEQ ID NO: 2744 - protein, 108 aa, synthetic construct
  REGION 1..108: note = Non-Selective Anti-FLT3 Full VL
DIQMTQSPSSLSASVGDRVTITCRASQSIYTHLNWYQQKPGKAPKLLIYAASRLQTGVPSRFSGSGSGTDFTLTISSLQPEDFATYYCQQSYSFPFTFGPGTKVDIKR

SEQ ID NO: 2745 - protein, 108 aa, synthetic construct
  REGION 1..108: note = Non-Selective Anti-FLT3 Full VL
DIQMTQSPSSLSASVGDRVTITCRASQGISNSLAWYQQKPGKAPKLLIYAASSLQSGVPSRFSGSGSGTDFTLTISSLQPEDFATYYCQQSHSPPYTFGQGTKLEIKR

SEQ ID NO: 2746 - protein, 109 aa, synthetic construct
  REGION 1..109: note = Non-Selective Anti-FLT3 Full VL
EIVMTQSPATLSVSPGERATLSCRASQSVSADYIAWYQQKPGQAPRLLIYDVSTRASGIPARFSGSGSGTEFTLTISSLQSEDFAVYYCQHYGSSQVTFGQGTKVEIKR

SEQ ID NO: 2747 - protein, 108 aa, synthetic construct
  REGION 1..108: note = Non-Selective Anti-FLT3 Full VL
DIQMTQSPSSLSASVGDRVTITCRASQSISTYLNWYQQKPGKAPKLLIYAASNLQSGVPSRFSGSGSGTDFTLTISSLQPEDFATYYCQQSYSSPLTFGPGTKVDIKR

SEQ ID NO: 2748 - protein, 108 aa, synthetic construct
  REGION 1..108: note = Non-Selective Anti-FLT3 Full VL
DIQMTQSPSSLSASVGDRVTITCRASQNIANSLNWYQQKPGKAPKLLIYAASSLQSGVPSRFSGSGSGTDFTLTISSLQPEDFATYYCQQYSSYPPTFGPGTKVDIKR

SEQ ID NO: 2749 - protein, 113 aa, synthetic construct
  REGION 1..113: note = Non-Selective Anti-FLT3 Full VL
DIVMTQSPLSLPVTPGEPASISCRSSQSLLHSNGYNYLDWYLQKPGQSPQLLIYAASSLQSGVPDRFSGSGSGTDFTLKISRVEAEDVGVYYCMQGLRTPHTFGGGTKVEIKR

SEQ ID NO: 2750 - protein, 114 aa, synthetic construct
  REGION 1..114: note = Non-Selective Anti-FLT3 Full VL
DIVMTQSPDSLAVSLGERATINCKSSQSVLYSSNNKNYLAWYQQKPGQPPKLLIYWASIRESGVPDRFSGSGSGTDFTLTISSLQAEDVAVYYCQQYYTTPITFGQGTRLEIKR

SEQ ID NO: 2751 - protein, 108 aa, synthetic construct
  REGION 1..108: note = Non-Selective Anti-FLT3 Full VL
EIVMTQSPATLSVSPGERATLSCRASQSVSSNLAWYQQKPGQAPRLLIYGASTRATGIPARFSGSGSGTEFTLTISSLQSEDFAVYYCQQYGSSPLTFGGGTKVEIKR

SEQ ID NO: 2752 - protein, 108 aa, synthetic construct
  REGION 1..108: note = Non-Selective Anti-FLT3 Full VL
EIVMTQSPATLSVSPGERATLSCRASQSVSSNLAWYQQKPGQAPRLLIYDVSSRATGIPARFSGSGSGTEFTLTISSLQSEDFAVYYCQQLDAYPLTFGGGTKVEIKR

SEQ ID NO: 2753 - protein, 113 aa, synthetic construct
  REGION 1..113: note = Non-Selective Anti-FLT3 Full VL
DIVMTQSPLSLPVTPGEPASISCRSSQSLLHSNGYNYLDWYLQKPGQSPQLLIYAASTLQSGVPDRFSGSGSGTDFTLKISRVEAEDVGVYYCMQALQTPLTFGGGTKVEIKR

SEQ ID NO: 2754 - protein, 113 aa, synthetic construct
  REGION 1..113: note = Non-Selective Anti-FLT3 Full VL
DIVMTQSPLSLPVTPGEPASISCRSSQSLLHSNGYNYLDWYLQKPGQSPQLLIYLGSNRASGVPDRFSGSGSGTDFTLKISRVEAEDVGVYYCMQGLQTPYTFGQGTRLEIKR

SEQ ID NO: 2755 - protein, 109 aa, synthetic construct
  REGION 1..109: note = Non-Selective Anti-FLT3 Full VL
EIVMTQSPATLSVSPGERATLSCRASQSVGSSYLAWYQQKPGQAPRLLIYDVSTRAAGIPARFSGSGSGTEFTLTISSLQSEDFAVYYCHQYGSSPYTFGQGTKVEIKR

SEQ ID NO: 2756 - protein, 108 aa, synthetic construct
  REGION 1..108: note = Non-Selective Anti-FLT3 Full VL
DIQMTQSPSSLSASVGDRVTITCRASQSISSYLNWYQQKPGKAPKLLIYAASSLQSGVPSRFSGSGSGTDFTLTISSLQPEDFATYYCQQSYSTPLTFGQGTRLEIKR

SEQ ID NO: 2757 - protein, 108 aa, synthetic construct
  REGION 1..108: note = Non-Selective Anti-FLT3 Full VL
DIQMTQSPSSLSASVGDRVTITCRASQSISNYLAWYQQKPGKAPKLLIYAASSLQGGVPSRFSGSGSGTDFTLTISSLQPEDFATYYCQQSYSTPWTFGQGTKVEIKR

SEQ ID NO: 2758 - protein, 107 aa, synthetic construct
  REGION 1..107: note = Non-Selective Anti-FLT3 Full VL
EIVMTQSPATLSVSPGERATLSCRASESVSSALAWYQQKPGQAPRLLIYGASTRATGIPARFSGSGSGTEFTLTISSLQSEDFAVYYCQQYGNSVTFGGGTKVEIKR

SEQ ID NO: 2759 - protein, 109 aa, synthetic construct
  REGION 1..109: note = Non-Selective Anti-FLT3 Full VL
EIVMTQSPATLSVSPGERATLSCRASQTLTGGLLAWYQQKPGQAPRLLIYDTSSRAAGIPARFSGSGSGTEFTLTISSLQSEDFAVYYCHHYGSSPYTFGQGTKVEIKR

SEQ ID NO: 2760 - protein, 108 aa, synthetic construct
  REGION 1..108: note = Non-Selective Anti-FLT3 Full VL
DIQMTQSPSSLSASVGDRVTITCRASQDIRNDLGWYQQKPGKAPKLLIYAASSLQSGVPSRFSGSGSGTDFTLTISSLQPEDFATYYCQQSYSSPFTFGQGTKVEIKR

SEQ ID NO: 2761 - protein, 109 aa, synthetic construct
  REGION 1..109: note = Non-Selective Anti-FLT3 Full VL
EIVMTQSPATLSVSPGERATLSCRASQSVSSSYLAWYQQKPGQAPRLLIYGASTRATGIPARFSGSGSGTEFTLTISSLQSEDFAVYYCQQYSSSPLTFGQGTKVEIKR

SEQ ID NO: 2762 - protein, 108 aa, synthetic construct
  REGION 1..108: note = Non-Selective Anti-FLT3 Full VL
DIQMTQSPSSLSASVGDRVTITCQATQDISNYLNWYQQKPGKAPKLLIYGASNLPSGVPSRFSGSGSGTDFTLTISSLQPEDFATYYCQQSYSDLLTFGPGTKVDIKR

SEQ ID NO: 2763 - protein, 109 aa, synthetic construct
  REGION 1..109: note = Non-Selective Anti-FLT3 Full VL
EIVMTQSPATLSVSPGERATLSCRGSQSISGNYLAWYQQKPGQAPRLLIYDTSARAAGIPARFSGSGSGTEFTLTISSLQSEDFAVYYCQQYNSYPLTFGGGTKVEIKR

SEQ ID NO: 2764 - protein, 108 aa, synthetic construct
  REGION 1..108: note = Non-Selective Anti-FLT3 Full VL
DIQMTQSPSSLSASVGDRVTITCRASQDLDRYLAWYQQKPGKAPKLLIYAASSLQTGVPSRFSGSGSGTDFTLTISSLQPEDFATYYCQQYYSTPYTFGQGTKLEIKR

SEQ ID NO: 2765 - protein, 107 aa, synthetic construct
  REGION 1..107: note = Non-Selective Anti-FLT3 Full VL
EIVMTQSPATLSVSPGERATLSCRASQSIGNNLKAWYQQKPGQAPRLLIYDTSAHTTGIPARFSGSGSGTEFTLTISSLQSEDFAVYYCQHYGNSLTFGQGTKVEIK

SEQ ID NO: 2766 - protein, 109 aa, synthetic construct
  REGION 1..109: note = Non-Selective Anti-FLT3 Full VL
EIVMTQSPATLSVSPGERATLSCRASQSVGSSSLAWYQQKPGQAPRLLIYGASTRATGIPARFSGSGSGTEFTLTISSLQSEDFAVYYCQQYGSSPYTFGQGTKVEIKR

SEQ ID NO: 2767 - protein, 109 aa, synthetic construct
  REGION 1..109: note = Non-Selective Anti-FLT3 Full VL
EIVMTQSPATLSVSPGERATLSCRASQSVSSNYLAWYQQKPGQAPRLLIYDVSTRATGIPARFSGSGSGTEFTLTISSLQSEDFAVYYCQQYGSSTLTFGGGTKVEIKR

SEQ ID NO: 2768 - protein, 108 aa, synthetic construct; identical to SEQ ID NO: 331
  REGION 1..108: note = Non-Selective Anti-FLT3 Full VL

SEQ ID NO: 2769 - protein, 108 aa, synthetic construct
  REGION 1..108: note = Non-Selective Anti-FLT3 Full VL
DIQMTQSPSSLSASVGDRVTITCRASQDISRWLAWYQQKPGKAPKLLIYAASSLQSGVPSRFSGSGSGTDFTLTISSLQPEDFATYYCQQYDNFPLTFGGGTKLEIKR

SEQ ID NO: 2770 - protein, 109 aa, synthetic construct
  REGION 1..109: note = Non-Selective Anti-FLT3 Full VL
EIVMTQSPATLSVSPGERATLSCRASQSVSSSSLAWYQQKPGQAPRLLIYDTSTRATGIPARFSGSGSGTEFTLTISSLQSEDFAVYYCQQYGTSPITFGQGTRLEIKR

SEQ ID NO: 2771 - protein, 108 aa, synthetic construct
  REGION 1..108: note = Non-Selective Anti-FLT3 Full VL
DIQMTQSPSSLSASVGDRVTITCQASHDIRNSVNWYQQKPGKAPKLLIYATSSLQSGVPSRFSGSGSGTDFTLTISSLQPEDFATYYCQQSYNTPFTFGQGTKLEIKR

SEQ ID NO: 2772 - protein, 108 aa, synthetic construct
  REGION 1..108: note = Non-Selective Anti-FLT3 Full VL
DIQMTQSPSSLSASVGDRVTITCRASHDINNYLNWYQQKPGKAPKLLIYDASNLETGVPSRFSGSGSGTDFTLTISSLQPEDFATYYCQQADSFPLTFGGGTKVEIKR

SEQ ID NO: 2773 - protein, 108 aa, synthetic construct
  REGION 1..108: note = Non-Selective Anti-FLT3 Full VL
DIQMTQSPSSLSASVGDRVTITCRASQSISSWLAWYQQKPGKAPKLLIYAASTLQSGVPSRFSGSGSGTDFTLTISSLQPEDFATYYCQQSYSTPWTFGQGTKLEIKR

SEQ ID NO: 2774 - protein, 108 aa, synthetic construct
  REGION 1..108: note = Non-Selective Anti-FLT3 Full VL
DIQMTQSPSSLSASVGDRVTITCRASQSIKGALAWYQQKPGKAPKLLIYSASNLQSGVPSRFSGSGSGTDFTLTISSLQPEDFATYYCQQYNSYPLTFGGGTKVEIKR

SEQ ID NO: 2775 - protein, 114 aa, synthetic construct
  REGION 1..114: note = Non-Selective Anti-FLT3 Full VL
DIVMTQSPDSLAVSLGERATINCKSSQSLFYSSNNRNYLAWYQQKPGQPPKLLIYWASTRESGVPDRFSGSGSGTDFTLTISSLQAEDVAVYYCQQYYSIPYTFGQGTKVEIKR

SEQ ID NO: 2776 - protein, 108 aa, synthetic construct
  REGION 1..108: note = Non-Selective Anti-FLT3 Full VL
DIQMTQSPSSLSASVGDRVTITCRSSQSISTYLNWYQQKPGKAPKLLIYGASNLQSGVPSRFSGSGSGTDFTLTISSLQPEDFATYYCQQVISYPITFGGGTKVEIKR

SEQ ID NO: 2777 - protein, 114 aa, synthetic construct
  REGION 1..114: note = Non-Selective Anti-FLT3 Full VL
DIVMTQSPDSLAVSLGERATINCKSSQSISHSPNTRDYLAWYQQKPGQPPKLLIYWASTRESGVPDRFSGSGSGTDFTLTISSLQAEDVAVYYCQQYYSSPFTFGPGTKVDIKR

SEQ ID NO: 2778 - protein, 109 aa, synthetic construct
  REGION 1..109: note = Non-Selective Anti-FLT3 Full VL
EIVMTQSPATLSVSPGERATLSCRASQRVGNTYLAWYQQKPGQAPRLLIYDVSARASGIPARFSGSGSGTEFTLTISSLQSEDFAVYYCQQYLSPPLTFGGGTKVEIKR

SEQ ID NO: 2779 - protein, 109 aa, synthetic construct
  REGION 1..109: note = Non-Selective Anti-FLT3 Full VL
EIVMTQSPATLSVSPGERATLSCRASQSVSSSYLAWYQQKPGQAPRLLIYDVSTRATGIPARFSGSGSGTEFTLTISSLQSEDFAVYYCQQYGSSPITFGQGTKVEIKR

SEQ ID NO: 2780 - protein, 108 aa, synthetic construct
  REGION 1..108: note = Non-Selective Anti-FLT3 Full VL
DIQMTQSPSSLSASVGDRVTITCRASQDISNYLAWYQQKPGKAPKLLIYAASSLQSGVPSRFSGSGSGTDFTLTISSLQPEDFATYYCQQYYSYPLTFGGGTKVEIKR

SEQ ID NO: 2781 - protein, 109 aa, synthetic construct
  REGION 1..109: note = Non-Selective Anti-FLT3 Full VL
EIVMTQSPATLSVSPGERATLSCRASQSVNSEHLAWYQQKPGQAPRLLIYDTSSRATGIPARFSGSGSGTEFTLTISSLQSEDFAVYYCQQYGSSPVTFGQGTKVEIKR

SEQ ID NO: 2782 - protein, 108 aa, synthetic construct
  REGION 1..108: note = Non-Selective Anti-FLT3 Full VL
EIVMTQSPATLSVSPGERATLSCRASQSVGSQLGWYQQKPGQAPRLLIYGASTRATGIPARFSGSGSGTEFTLTISSLQSEDFAVYYCQQSFSTPLTFGGGTKVEIKR

SEQ ID NO: 2783 - protein, 108 aa, synthetic construct
  REGION 1..108: note = Non-Selective Anti-FLT3 Full VL
DIQMTQSPSSLSASVGDRVTITCRASQDISNFVAWYQQKPGKAPKLLIYAASSLQSGVPSRFSGSGSGTDFTLTISSLQPEDFATYYCQQSFDTPYTFGQGTKLEIKR

SEQ ID NO: 2784 - protein, 109 aa, synthetic construct
  REGION 1..109: note = Non-Selective Anti-FLT3 Full VL
EIVMTQSPATLSVSPGERATLSCRASQSVNNNQLAWYQQKPGQAPRLLIYDTSSRATGIPARFSGSGSGTEFTLTISSLQSEDFAVYYCQQYDTSPYTFGQGTKVEIKR

SEQ ID NO: 2785 - protein, 109 aa, synthetic construct
  REGION 1..109: note = Non-Selective Anti-FLT3 Full VL
EIVMTQSPATLSVSPGERATLSCRASQSISSSYLAWYQQKPGQAPRLLIYDVSARATGIPARFSGSGSGTEFTLTISSLQSEDFAVYYCQQYYSTPLTFGPGTKVDIKR

SEQ ID NO: 2786 - protein, 108 aa, synthetic construct
  REGION 1..108: note = Non-Selective Anti-FLT3 Full VL
DIQMTQSPSSLSASVGDRVTITCRASQSISSYLNWYQQKPGKAPKLLIYDASNLETGVPSRFSGSGSGTDFTLTISSLQPEDFATYYCQQTYTTPLTFGQGTKVEIKR

SEQ ID NO: 2787 - protein, 109 aa, synthetic construct
  REGION 1..109: note = Non-Selective Anti-FLT3 Full VL
EIVMTQSPATLSVSPGERATLSCRASQSVSYNQLAWYQQKPGQAPRLLIYDISSRAAGIPARFSGSGSGTEFTLTISSLQSEDFAVYYCQQYGGLPATFGQGTRLEIKR

SEQ ID NO: 2788 - protein, 108 aa, synthetic construct
  REGION 1..108: note = Non-Selective Anti-FLT3 Full VL
DIQMTQSPSSLSASVGDRVTITCQASQYISNYLNWYQQKPGKAPKLLIYDASSLESGVPSRFSGSGSGTDFTLTISSLQPEDFATYYCQQSYSTPYTFGQGTKLEIKR

SEQ ID NO: 2789 - protein, 109 aa, synthetic construct
  REGION 1..109: note = Non-Selective Anti-FLT3 Full VL
EIVMTQSPATLSVSPGERATLSCRASQSVSSSSLAWYQQKPGQAPRLLIYDASTRASGIPARFSGSGSGTEFTLTISSLQSEDFAVYYCQQYNRLPYTFGQGTKLEIKR

SEQ ID NO: 2790 - protein, 114 aa, synthetic construct
  REGION 1..114: note = Non-Selective Anti-FLT3 Full VL
DIVMTQSPDSLAVSLGERATINCKSSQSVLYSSNNKNYLAWYQQKPGQPPKLLIYWASTRESGVPDRFSGSGSGTDFTLTISSLQAEDVAVYYCQQYYKTPLTFGGGTKLEIKR

SEQ ID NO: 2791 - protein, 108 aa, synthetic construct; identical to SEQ ID NO: 331
  REGION 1..108: note = Non-Selective Anti-FLT3 Full VL

SEQ ID NO: 2792 - protein, 108 aa, synthetic construct
  REGION 1..108: note = Non-Selective Anti-FLT3 Full VL
EIVMTQSPATLSVSPGERATLSCRASQSVSSYLAWYQQKPGQAPRLLIYDTSTRATGIPARFSGSGSGTEFTLTISSLQSEDFAVYYCQQYHSSPWTFGQGTKVEIKR

SEQ ID NO: 2793 - protein, 108 aa, synthetic construct
  REGION 1..108: note = Non-Selective Anti-FLT3 Full VL
EIVMTQSPATLSVSPGERATLSCRASQSVDNLVGWYQQKPGQAPRLLIYDISSRATGIPARFSGSGSGTEFTLTISSLQSEDFAVYYCQQYGRSPITFGQGTRLEIKR

SEQ ID NO: 2794 - protein, 114 aa, synthetic construct
  REGION 1..114: note = Non-Selective Anti-FLT3 Full VL
DIVMTQSPDSLAVSLGERATINCKSSQSVLYSSNNENYLAWYQQKPGQPPKLLIYWASTRESGVPDRFSGSGSGTDFTLTISSLQAEDVAVYYCQQYYSLPVTFGQGTKLEIKR

SEQ ID NO: 2795 - protein, 108 aa, synthetic construct
  REGION 1..108: note = Non-Selective Anti-FLT3 Full VL
DIQMTQSPSSLSASVGDRVTITCRASQSISSSLNWYQQKPGKAPKLLIYKASSLESGVPSRFSGSGSGTDFTLTISSLQPEDFATYYCQQYYSYPPTFGGGTKVEIKR

SEQ ID NO: 2796 - protein, 108 aa, synthetic construct
  REGION 1..108: note = Non-Selective Anti-FLT3 Full VL
DIQMTQSPSSLSASVGDRVTITCQASQDISNYLNWYQQKPGKAPKLLIYQASNKDTGVPSRFSGSGSGTDFTLTISSLQPEDFATYYCQQSYSTPPTFGQGTKLEIKR

SEQ ID NO: 2797 - protein, 109 aa, synthetic construct
  REGION 1..109: note = Non-Selective Anti-FLT3 Full VL
EIVMTQSPATLSVSPGERATLSCRASQSVSSSYLAWYQQKPGQAPRLLIYDASARAAGIPARFSGSGSGTEFTLTISSLQSEDFAVYYCQQYYSTPYTFGQGTKLEIKR

SEQ ID NO: 2798 - protein, 108 aa, synthetic construct
  REGION 1..108: note = Non-Selective Anti-FLT3 Full VL
EIVMTQSPATLSVSPGERATLSCRASRSISDYLAWYQQKPGQAPRLLIYDASSRATGIPARFSGSGSGTEFTLTISSLQSEDFAVYYCQQYYTTPLTFGQGTKVEIKR

SEQ ID NO: 2799 - protein, 108 aa, synthetic construct
  REGION 1..108: note = Non-Selective Anti-FLT3 Full VL
DIQMTQSPSSLSASVGDRVTITCRASQSISSYLNWYQQKPGKAPKLLIYAASSLQSGVPSRFSGSGSGTDFTLTISSLQPEDFATYYCQQSYSTPWTFGQGTKVEIKR

SEQ ID NO: 2800 - protein, 108 aa, synthetic construct
  REGION 1..108: note = Non-Selective Anti-FLT3 Full VL
DIQMTQSPSSLSASVGDRVTITCRASHNISTWLAWYQQKPGKAPKLLIYAASSLQSGVPSRFSGSGSGTDFTLTISSLQPEDFATYYCQQSYSTPPTFGQGTRLEIKR

SEQ ID NO: 2801 - protein, 114 aa, synthetic construct
  REGION 1..114: note = Non-Selective Anti-FLT3 Full VL
DIVMTQSPDSLAVSLGERATINCKSSQSVLYSSNNKNYLAWYQQKPGQPPKLLIYWASTRESGVPDRFSGSGSGTDFTLTISSLQAEDVAVYYCQQYYSSPLTFGGGTKVEIKR

SEQ ID NO: 2802 - protein, 109 aa, synthetic construct
  REGION 1..109: note = Non-Selective Anti-FLT3 Full VL
EIVMTQSPATLSVSPGERATLSCRASQSVSSSYLAWYQQKPGQAPRLLIYDVSTRASGIPARFSGSGSGTEFTLTISSLQSEDFAVYYCQQYNNWPYTFGQGTKLEIKR

SEQ ID NO: 2803 - protein, 108 aa, synthetic construct
  REGION 1..108: note = Non-Selective Anti-FLT3 Full VL
DIQMTQSPSSLSASVGDRVTITCRASQSISSSLAWYQQKPGKAPKLLIYAASSLQSGVPSRFSGSGSGTDFTLTISSLQPEDFATYYCQQSYTIPPTFGQGTKLEIKR

SEQ ID NO: 2804 - protein, 108 aa, synthetic construct
  REGION 1..108: note = Non-Selective Anti-FLT3 Full VL
DIQMTQSPSSLSASVGDRVTITCRASQGISNNLNWYQQKPGKAPKLLIYKASTLESGVPSRFSGSGSGTDFTLTISSLQPEDFATYYCQQSYSTPITFGQGTKVEIKR

SEQ ID NO: 2805 - protein, 108 aa, synthetic construct
  REGION 1..108: note = Non-Selective Anti-FLT3 Full VL
DIQMTQSPSSLSASVGDRVTITCQASQGITSYLNWYQQKPGKAPKLLIYKASSLESGVPSRFSGSGSGTDFTLTISSLQPEDFATYYCQQGYSTPLTFGGGTKVEIKR

SEQ ID NO: 2806 - protein, 108 aa, synthetic construct
  REGION 1..108: note = Non-Selective Anti-FLT3 Full VL
DIQMTQSPSSLSASVGDRVTITCRASQSISSYLNWYQQKPGKAPKLLIYDASNLETGVPSRFSGSGSGTDFTLTISSLQPEDFATYYCQQTYSAPPTFGQGTKLEIKR

SEQ ID NO: 2807 - protein, 113 aa, synthetic construct; identical to SEQ ID NO: 2754
  REGION 1..113: note = Non-Selective Anti-FLT3 Full VL

SEQ ID NO: 2808 - protein, 108 aa, synthetic construct
  REGION 1..108: note = Non-Selective Anti-FLT3 Full VL
DIQMTQSPSSLSASVGDRVTITCRASQSISTYVNWYQQKPGKAPKLLIYDTSSLQSGVPSRFSGSGSGTDFTLTISSLQPEDFATYYCQQSFITPPTFGQGTKLEIKR

SEQ ID NO: 2809 - protein, 112 aa, synthetic construct
  REGION 1..112: note = Non-Selective Anti-FLT3 Full VL
DIVMTQSPLSLPVTPGEPASISCRSSQSLLHSNGYNYLDWYLQKPGQSPQLLIYLGSNRASGVPDRFSGSGSGTDFTLKISRVEAEDVGVYYCMQALQTPTFGGGTKVEIKR

SEQ ID NO: 2810 - protein, 108 aa, synthetic construct
  REGION 1..108: note = Non-Selective Anti-FLT3 Full VL
DIQMTQSPSSLSASVGDRVTITCRASQGIRNDLGWYQQKPGKAPKLLIYQASSLENGVPSRFSGSGSGTDFTLTISSLQPEDFATYYCQQAYSLPWTFGQGTKLEIKR
